(19) United States
(12) Patent Application Publication
(10) Pub. No.: US 2019/0374600 A1
(43) Pub. Date: Dec. 12, 2019

(54) PHARMACEUTICAL ASSOCIATION COMPRISING A GROWTH FACTOR RECEPTOR AGONIST CONJUGATED TO A BIOACTIVE CARRIER FOR CONVERTING A NEOPLASTIC CELL INTO A NON-NEOPLASTIC CELL AND USES THEREOF

(71) Applicant: HISTIDE AG, Schindellegi (CH)

(72) Inventors: Omar F. ZOUANI, Einsiedeln (CH); Veronika GOCHEVA, Einsiedeln (CH)

(21) Appl. No.: 15/760,838

(22) PCT Filed: Sep. 15, 2016
(86) PCT No.: PCT/EP2016/071785

§ 371 Date: Mar. 16, 2018

Related U.S. Application Data
(60) Provisional application No. 62/219,716, filed on Sep. 17, 2015.

(51) Int. Cl. A61K 38/12; G16B 15/00; A61P 35/00; G01N 33/50

(52) U.S. Cl. CPC A61K 38/12; G16B 15/00; C07K 2299/00; G01N 33/5017; A61P 35/00

(57) ABSTRACT

The present disclosure provides a pharmaceutical association for use in the treatment, prevention and/or diagnostic of a neoplastic disease, said association comprising at least one growth factor receptor-binding compound, which activates at least one growth factor receptor of a neoplastic cell, and at least one bioactive carrier forming at least one covalent or non-covalent interaction with said at least one growth factor receptor-binding compound, and wherein said association reduces or suppresses, in the neoplastic cell, the gene expression of at least one cyclin D and/or reduces or suppresses the formation of at least one complex formed between said at least one cyclin D and at least one of cyclin dependent-kinase 4 or 6.

### CROSS-REFERENCE TO RELATED APPLICATIONS

[0001] This application is a U.S. National Stage application of International Application No. PCT/EP2016/071785 filed 15 Sep. 2016, which claims priority to U.S. Provisional Application No. 62/219,716 filed 17 Sep. 2015, the entire disclosures of which are hereby incorporated by reference in their entireties.

### SEQUENCE LISTING

[0002] The instant application contains a Sequence Listing which has been submitted electronically in ASCII format and is hereby incorporated by reference in its entirety. Said ASCII copy, created on 25 May 2019, is named 2019-05-25_CORRECTEDSEQUENCE.txt and is 4,539 kilobytes in size.

### FIELD OF THE INVENTION

[0003] The invention relates to associations, combinations, compositions, kits, methods and processes for the design, preparation, manufacture and/or formulation thereof, and methods and uses thereof for converting or recoding a neoplastic cell into a non-neoplastic cell and treating and/or preventing a neoplastic disease.

### BACKGROUND

[0004] Neoplastic cells, such as cancer cells, are generally characterized by abnormal and/or uncontrolled proliferation leading, in most cases, to the development of a neoplastic disease, such as cancer. Conventional methods for treating neoplastic diseases include surgical treatments, radiotherapy and chemotherapy.

[0005] Surgery is usually practised in order to extract localised (non-circulating) neoplastic cells from a patient's body and is most generally combined with radiotherapy treatments. As well as being limited to the treatment of very early stage, non-metastatic tumors, surgery is an invasive medical procedure which remains traumatic for the treated patient, involves the permanent removal of tissues or organs (which is sometimes not possible as some organs or organ parts are not accessible or cannot be removed due to life threatening consequences), in some cases has been shown to “unblock” dormant tumors, while only offering a “visual” selectivity to distinguish between healthy and tumor cells. Radiotherapy also presents some significant drawbacks for the treated patients including the high cost of the radiation therapy equipment, the high cost of the treatment itself, side effects associated with the damage or destruction of healthy cells, limited effectiveness against metastasized neoplastic diseases, skin rashes caused by external beam radiation, the potential deleterious impact on the functioning of tissues, glands or organs located near the site of treatment, and the possible development of secondary cancers as a result of exposure to the radiations.

[0006] Conventional chemotherapy methods generally involve the administration of small synthetic regulatory molecules which inhibit specific intracellular target proteins thought to be responsible for the neoplastic phenotype of the cell. One example is the inhibition of tyrosine kinase signal transduction by small molecule inhibitors to regulate uncontrolled cell proliferation. Typical chemotherapy methods also include treatments wherein DNA is covalently altered by e.g. DNA strands crosslinking, or treatments wherein the polymerisation and depolymerisation of microtubules is enhanced prevented thus provoking apoptosis of the damaged cell.

[0007] Another method for treating neoplastic diseases includes gene therapy wherein a missing or defective gene is replaced with a functional, healthy copy, which is delivered to the target dysfunctional cells using a “vector.” Gene transfer therapy can be done outside the body (ex vivo) by extracting bone marrow or blood from the patient and growing the cells in a laboratory. The corrected copy of the gene is then introduced and allowed to penetrate the cells' DNA before being injected back into the body. Gene transfers can also be done directly inside the patient's body (in vivo). Gene therapy has been applied to a few specific cases of blood cancers (chronic lymphocytic leukemia (CLL), acute lymphocytic leukemia (ALL) and multiple myeloma) through a particular form thereof in which the genetically modified cells were not the neoplastic cells themselves but instead the immune T-cells. Modified T-cells could then target and destroy specific blood cells (neoplastic as well as healthy). The body of the patient is then able to produce healthy blood cells and eventually provide a treatment to certain blood cancer types. However, gene therapy is generally best suited for the treatment of diseases caused by a single defective gene, not neoplastic diseases, which often involve multiple defective genes. Overall, issues such as the correct integration of therapeutic DNA into the genome; the immune system response to the introduction of foreign DNA into the cell; the toxicity, immune and inflammatory responses; gene control and targeting issues of the vectors (usually viral) required to transport the DNA inside the cell; the difficulties associated with the treatment of multigene-associated neoplastic cells; the possibilities of inducing tumors if the DNA is integrated in the wrong place in the genome; and/or the significant cost usually involved with such a therapy, have greatly undermined the development of gene therapy.

[0008] Other intracellular therapies have been contemplated for the treatment of neoplastic diseases using, for instance, micro-ribonucleic acids (miRNAs) or small interfering ribonucleic acids (siRNA). Under these conditions, the neoplastic cell is generally forced to down-regulate or repress the expression of one or more specific target genes (e.g. oncogenes) thus inhibiting the expression of defective and/or defecting proteins (e.g. oncoproteins). One example is the repression of genes encoding key proteins in the proliferation of cancer cells such as vascular endothelial growth factor (VEGF) and kinesin spindle protein (KSP), thus controlling cancer proliferation.

[0009] Neoplastic diseases may also be treated using immunotherapy such as antibody therapies wherein the antibodies bind to a target antigen typically on the surface of the neoplastic cell. Cell surface receptors are common targets for antibody therapies and include the epidermal growth factor receptor, HER2, CD52, the vascular endothelial growth factor-A and CD30. Once bound to an antigen (e.g. a cancer antigen), antibodies can induce antibody-dependent cell-mediated cytotoxicity, activate the complement system, prevent a receptor interacting with its ligand or deliver a payload of chemotherapy or radiation, which may all lead to the induction of neoplastic cell death. For instance, Cetuximab (Erbitux) is a chimeric IgG1 monoclonal antibody that targets the extracellular domain of the epidermal growth factor receptor (EGFR). Once a ligand binds to the EGFR on the surface of the cell, signalling pathways are activated inside the cell that are associated with malignant characteristics such as cancer cell proliferation and invasion. Cetuximab competitively inhibits ligand binding, thereby preventing EGFR activation and subsequent cellular signalling. It also activates programmed cell death (apoptosis).

[0010] Other intracellular treatments such as messenger ribonucleic acids (mRNAs)-based therapies have also been used in the treatment of neoplastic disease wherein administration of mRNA material into a neoplastic cell causes the neoplastic cell e.g. to express specifically encoded antigens and causing the neoplastic cell to be eliminated by the host immune system.

[0011] Differentiation therapy is another technique which was developed on the concept that the acquisition of the malignant phenotype (such as neoplasia) in a cell is considered as a progressive de-differentiation or a defective differentiation of that cell. Thus, as e.g. tumor cell populations evolve to greater degrees of malignancy, they usually lose more and more differentiation markers. This led to the suggestion that it may be possible to treat cancer by inducing differentiation of cancer cells. However, some scientific reports have shown that the differentiation therapy does not in fact induce cancer cells differentiation but instead restrains their growth thus allowing the application of more conventional therapies (such as chemotherapy) to eradicate the malignant cells. Examples of differentiation therapy involve the forced (re-)expression of some specific micro-RNAs and thus rely on an intracellular action generally presenting the same drawbacks as in any other intracellular therapies such the siRNA and gene therapies.

[0012] A shortcoming of the medical therapies relying on previously reported methods of treatment are numerous and mainly resides in the incapacity of providing a sustainable therapeutic effect i.e. the treated cells are not healed but instead are either destroyed (e.g. through induced apoptosis) or their proliferation reduced or temporarily halted using a sustained administration of therapeutic molecules until, in most case scenarios, neoplastic cells are able to adapt themselves and render the therapy ineffective. Interrupting a known therapy will usually lead to resumption of the neoplastic cell state.

[0013] Other drawbacks associated with previously reported therapies are numerous. For example, they may be very invasive and traumatic for the patient; they may necessitate permanently removing neoplastic tissues or organs which may be in some cases not practicable or feasible (organs or organ parts not accessible) or not possible due to life-threatening consequences; they may not be applied to or have limited effectiveness against metastatic neoplastic cells; they may not possess the ability to remove or treat all neoplastic cell types (i.e. neoplastic cells having different invasiveness levels and/or of different lineage origins); they may potentially “unblock” dormant tumors; they are often expensive; they may damage or destroy healthy cells alongside neoplastic cells thereby causing adverse treatment side effects; they may cause skin rashes and skin sensitivity; they may not target cancer stem cells as these are not proliferating; they may have a mutagenic action even towards healthy cells; they may require sustained administration to maintain treatment therapeutic effects; they may display very high cytotoxicity; they may cause multi-drug resistance whereby a drug having an intracellular action is no longer imported inside the cancer cell or is systematically exported outside of the cell.

[0014] None of these previously known methods allows for the effective recoding of a neoplastic cell thus permitting conversion of a neoplastic cell into a non-neoplastic cell.

[0015] The present invention thus provides associations, combinations, compositions, kits, methods and processes for the design, preparation, manufacture and/or formulation thereof, and methods and uses thereof for converting a neoplastic cell into a non-neoplastic cell including converting or recoding the neoplastic cell to induce, provide and/or reintroduce self-recovery or self-healing capabilities thereto.

### BRIEF DESCRIPTION OF THE DRAWINGS

[0016] FIG. 1 is a representation of a fluorescence intensity of non-covalent pharmaceutical associations comprising GFR-binding compounds and type-I collagen or apatite ceramics bioactive carriers. The images represent surfaces non-covalently coated with GFR-binding compounds labeled with FITC.

[0017] FIG. 2 is (a) a representation of a fluorescence intensity of pharmaceutical associations comprising various GFR-binding compounds and type-I collagen immediately after association or 3, 7 and 10 days after association. The images represent surfaces non-covalently coated with GFR-binding compounds labeled with FITC, (b) a total fluorescence intensity quantification of GFR-binding compounds labeled with FITC associated with apatite ceramics after incubation in cell culture medium for the given indicated times (up to 10 days).

[0018] FIG. 3 is (a) a representation of a Quantitative Real Time PCR analysis of the expression of DMP-1, Sclerostin and RANK-L in neoplastic cells (osteosarcoma cells) cultured on a native bioactive carrier (control) and on a bioactive carrier covalently associated with various GFR-binding compounds after 24 hours of culture, (P<0.001), (b) a 3D representation of a neoplastic cell cultured on a native bioactive carrier (left-hand side) and on a bioactive carrier covalently associated with a GFR-binding compound (right-hand side).

[0019] FIG. 4 is a representation of Quantitative Real Time PCR analysis of the expression of MLC-1, GATA-4 and α-Sarcomeric actin in neoplastic cells (Rabdomiosarcoma cells) cultured on a native bioactive carrier (control) and on a bioactive carrier covalently associated with various GFR-binding compounds after 24 hours of culture, (P<0.005).

[0020] FIG. 5 is a representation of Quantitative Real Time PCR analysis of the expression of Sox-9, IBSP and Collagen-IV in neoplastic cells (chondrosarcoma cells) cultured on a native bioactive carrier (control) and on a bioactive carrier covalently associated with various GFR-binding compounds after 24 hours of culture, (P<0.001).

[0021] FIG. 6 is a representation of Quantitative Real Time PCR analysis of the expression of MMP-9, Vimentin and QQSMA in neoplastic cells (adenocarcinoma cells) cultured on a native bioactive carrier (control) and on a bioactive carrier covalently associated with various GFR-binding compounds after 24 hours of culture, (P<0.005).

[0022] FIG. 7 is (a) a diagram representing a relative quantification from western blot of the amount of p53 protein present in neoplastic cells (osteosarcoma cells) cultured on a native bioactive carrier (control) and on a bioactive carrier covalently associated with various GFR-binding compounds after 24 hours of culture, (b) a diagram representing a relative quantification from western blot of the extent of phosphorylation of the pRB protein present in neoplastic cells cultured on a native bioactive carrier (control) and on a bioactive carrier covalently associated with various GFR-binding compounds after 24 hours of culture.

[0023] FIG. 8 is diagrams representing a relative quantification from western blot of the extent of phosphorylation of the ERK protein (a) and of the Src kinase (b) present in neoplastic cells (osteosarcoma cells) cultured on a native bioactive carrier (control) and on a bioactive carrier covalently associated with various GFR-binding compounds after 24 hours of culture, (c) a diagram representing a relative quantification from western blot of the amount of PDK1 protein present in neoplastic cells cultured on a native bioactive carrier (control) and on a bioactive carrier covalently associated with various GFR-binding compounds after 24 hours of culture.

[0024] FIG. 9 is a representation of a Quantitative Real Time PCR analysis of the expression of Paxillin (a) and Vinculin (b) in neoplastic cells (osteosarcoma cells) cultured on a native bioactive carrier (control) and on a bioactive carrier covalently associated with various GFR-binding compounds after 24 hours of culture, (P<0.001).

[0025] FIG. 10 is a representation of a Quantitative Real Time PCR analysis of the expression of Cyclin D (average gene expression of Cyclin D1, D2 and D3) at different time intervals during 24 hours in neoplastic cells (osteosarcoma cells) cultured on a native bioactive carrier (control) and on a bioactive carrier covalently associated with various GFR-binding compounds.

[0026] FIG. 11 is a diagram representing the grafting or association density of various radiolabeled GFR-binding compounds covalently associated with a bioactive carrier using radioactivity quantification.

[0027] FIG. 12 is (a) a representation of a Quantitative Real Time PCR analysis of the expression of DMP-1, SCT and RANK-L in neoplastic cells (osteosarcoma cells) cultured on a native polymer scaffold (control) and on a polymer scaffold grafted with a mixture comprising a GFR-binding compound as defined in the present disclosure and a RGD peptide, after 24 hours of culture, (b) immunofluorescence staining of a representative neoplastic cell (osteosarcoma cells) cultured on a polymer scaffold grafted with a mixture comprising a GFR-binding compound as defined in the present disclosure (ID SEQ NO: 2) and a RGD peptide, after 24 hours of culture. The actin filaments were immunostained by using Alexa 488-phalloidin.

[0028] The focal adhesions were represented by immunostaining with anti-vinculin. The nucleus was stained with DAPI and is represented by a circle in the center of the cell. Scale bar: 5 μm. (c) is a diagram representing the grafting density of a radiolabeled GFR-binding compound as defined in the present disclosure covalently grafted on a polymer scaffold and of a radiolabeled GFR-binding compound and a non-labeled RGD peptide both grafted on a polymer scaffold. The measurements were performed by using radioactivity quantification (no significant difference was observed). (d) Western Blot analysis of the expression of integrin subunits (α and β) in neoplastic cells cultured on a non-modified polymer scaffold, after 24h of culture. (e) Immunofluorescence staining of a representative neoplastic cell (osteosarcoma cells) cultured in presence of different integrin subunits (α and β) couples (anti-α3β1, anti-□αvβ3 and anti-□α5β3).

[0029] FIG. 13 is (a) Western blot analysis of the expression integrin α3 and β1 before and after transduction with two independent integrin □3 and β1 shRNAs, which efficiently reduced endogenous integrin α3β1 protein levels. (b) Immunofluorescence visualization of a neoplastic cell (osteosarcoma cells) after silencing integrins α3β1 by using shRNAs, after 24 hours of culture on a polymer scaffold covalently grafted with RGD peptides. The silencing of these specific integrin proteins were shown to significantly reduce or suppress neoplastic cell adhesion on the RGD grafted polymers. The actin filaments were immunostained by using Alexa 488-phalloidin. The focal adhesions were represented by immunostaining with anti-vinculin. The nucleus was stained with DAPI and is represented by a circle in the center of the cell. Scale bar: 5 μm. (c) Immunofluorescence visualization of neoplastic cells cultured on a polymer scaffold covalently modified with a mixture comprising a GFR-binding compound as defined herein (SEQ ID NO: 2) and a RGD peptide, after 24 hours of culture. Scale bar: 500 μm. A magnification of one region (right, Scale bar: 50 μm) indicates that Spheroid-like structures of neoplastic cells become predominant in this case as a result of the RGD induced integrin engagement. The actin filaments were immunostained by using Alexa 488-phalloidin. The focal adhesions were represented by immunostaining with anti-vinculin. The nucleus was stained with DAPI and is represented by a circle in the center of the cell.

[0030] FIG. 14 is a screen shot of the Standard Protein Blast online software used in the RMSD calculation procedure.

### DETAILED DESCRIPTION

[0031] Neoplastic diseases start when a cell (or neoplastic cell) is somehow altered so that it multiplies out of control. Tumors and cancers are some examples of neoplastic diseases. A tumor is a mass composed of a cluster of such abnormal cells. Most cancers form tumors, but not all tumors are cancerous. Benign, or non-cancerous, tumors—such as freckles and moles—stop growing, do not spread to other parts of the body, and do not create new tumors. Malignant, or cancerous, tumors crowd out healthy cells, interfere with body functions, and draw nutrients from body tissues. Cancers continue to grow and spread by direct extension or through a process called metastasis, whereby the malignant cells travel through the lymphatic or blood vessels, eventually forming new tumors in other parts of the body.

[0032] The term “cancer” generally encompasses more than one hundred diseases affecting nearly every part of the body, and all are potentially life threatening. The major types of cancer are carcinoma, sarcoma, melanoma, lymphoma, and leukemia.

[0033] Carcinoma is a type of cancer that develops from epithelial cells. Specifically, a carcinoma is a cancer that begins in a tissue that lines the inner or outer surfaces of the body, and that generally arises from cells originating in the endodermal or ectodermal germ layer during embryogenesis.

[0034] Sarcoma is a cancer that arises from transformed cells of mesenchymal origin. Thus, malignant tumors made of cancerous bone, cartilage, fat, muscle, vascular or hematopoietic tissues are, by definition, considered sarcomas. This is in contrast to a malignant tumor originating from epithelial cells, which are termed carcinoma. Human sarcomas are quite rare. Common malignancies, such as breast, colon, and lung cancer, are almost always carcinoma.

[0035] Melanoma is a type of skin cancer, which forms from melanocytes (pigment-containing cells in the skin).

[0036] Lymphoma is a group of blood cell tumors that develop from lymphocytes. It is sometimes used to refer to just the cancerous ones rather than all tumors. There are two main types: Hodgkin lymphoma (HL) and non-Hodgkin lymphoma (NHL), with two others, multiple myeloma and immunoproliferative diseases, also included by the World Health Organization within the category. Non-Hodgkin lymphoma makes up about 90% of cases and includes a large number of sub-types. Lymphomas are part of the broader group of neoplasms called tumors of the hematopoietic and lymphoid tissues.

[0037] Leukemia is a group of cancers that usually begins in the bone marrow and results in high numbers of abnormal white blood cells. These white blood cells are not fully developed and are called blasts or leukemia cells. Symptoms may include bleeding and bruising problems, feeling very tired, and an increased risk of infections. These symptoms occur due to a lack of normal blood cells. Diagnosis is typically by blood tests or bone marrow biopsy.

[0038] Cancers include, but are not limited to, Adrenal Cancer, Anal Cancer, Bile Duct Cancer, Bladder Cancer, Bone Cancer, Brain/CNS Tumors In Adults, Brain/CNS Tumors In Children, Breast Cancer, Breast Cancer In Men, Cancer in Adolescents, Cancer in Children, Cancer in Young Adults, Cancer of Unknown Primary, Castleman Disease, Cervical Cancer, Colon/Rectum Cancer, Endometrial Cancer, Esophagus Cancer, Ewing Family Of Tumors, Eye Cancer, Gallbladder Cancer, Gastrointestinal Carcinoid Tumors, Gastrointestinal Stromal Tumor (GIST), Gestational Trophoblastic Disease, Hodgkin Disease, Kaposi Sarcoma, Kidney Cancer, Laryngeal and Hypopharyngeal Cancer, Leukemia, Leukemia—Acute Lymphocytic (ALL) in Adults, Leukemia—Acute Myeloid (AML), Leukemia—Chronic Lymphocytic (CLL), Leukemia—Chronic Myeloid (CML), Leukemia—Chronic Myelomonocytic (CMML), Leukemia in Children, Liver Cancer, Lung Cancer, Lung Cancer—Non-Small Cell, Lung Cancer—Small Cell, Lung, Carcinoid Tumor, Lymphoma, Lymphoma of the Skin, Malignant Mesothelioma, Multiple Myeloma, Myelodysplastic Syndrome, Nasal Cavity and Paranasal Sinus Cancer, Nasopharyngeal Cancer, Neuroblastoma, Non-Hodgkin Lymphoma, Non-Hodgkin Lymphoma In Children, Oral Cavity and Oropharyngeal Cancer, Osteosarcoma, Ovarian Cancer, Pancreatic Cancer, Penile Cancer, Pituitary Tumors, Prostate Cancer, Retinoblastoma, Rhabdomyosarcoma, Salivary Gland Cancer, Sarcoma—Adult Soft Tissue Cancer, Skin Cancer, Skin Cancer—Basal and Squamous Cell, Skin Cancer—Melanoma, Skin Cancer—Merkel Cell, Small Intestine Cancer, Stomach Cancer, Testicular Cancer, Thymus Cancer, Thyroid Cancer, Uterine Sarcoma, Vaginal Cancer, Vulvar Cancer, Waldenstrom Macroglobulinemia, Wilms Tumor.

[0039] The activation of growth factor receptors (GFR) is commonly known to promote neoplastic cell proliferation. For instance, many cancer treatments rely on the inhibition of growth factors, growth factors receptors and/or downstream signalling proteins such as protein kinases. Such inhibitors include, non-exhaustively, anti-Met (e.g. ARQ-197), anti-VEGF (e.g. Bevacizumab), anti-VEGFR (e.g. Sunitinib or Semaxinib), anti-Her2 (e.g. Trastuzumab), anti-EGFR (e.g. Cetuximab, Gefitinib or Erlotinib), anti-PDGFR (e.g. Imatinib), anti-IGF-1 (e.g. IMC-A12), anti-Ras (e.g. Tipifarnib), anti-Raf (e.g. Sorafenib), anti-src (e.g. Dastinib or Saracatinib), anti-Mek (e.g. C1040 or PD-0325901), anti-PI3K (e.g. LY294002), anti-PDK (e.g. UNC01), anti-HSP90 (e.g. 17-AGG or IPI-504), anti-CDK (e.g. Flavopiridol) and anti-mTOR (e.g. Everolimus).

[0040] Unlike previously reported treatments, it has been surprisingly demonstrated that the pharmaceutical associations, combinations and compositions disclosed herein can be used to treat, prevent and/or diagnose neoplasms (e.g. tumors or cancers) by activating growth factor receptors of vertebrate cells (such as mammalian cells, especially human cells).

[0041] The present invention also aims at providing mechanisms for solving and/or avoiding at least one of, preferably a plurality of, the problems, issues and/or shortcomings associated with previously reported neoplasm treatment therapies.

[0042] The present disclosure thus provides embodiments for:
[0043] Converting or recoding a neoplastic cell to induce and/or promote and/or improve self-healing and/or self-recovery thereof, particularly within a shorter period of time
[0044] Converting or recoding a neoplastic cell to induce and/or promote and/or improve self-healing and/or self-recovery thereof, particularly with a higher conversion yield;
[0045] Restoring a neoplastic cell's ability to undergo conversion into a physiologically functional and/or healthy cell, particularly within a shorter period of time;
[0046] Restoring a neoplastic cell's ability to undergo differentiation, particularly within a shorter period of time;
[0047] Converting and/or recoding a circulating or non-circulating neoplastic cell such as a cancer cell, into a non-neoplastic cell, particularly within a shorter period of time;
[0048] Protecting a subject from a neoplastic disease, disorder, condition, or pathology such as cancer, or any symptoms thereof, particularly within a shorter period of time;
[0049] Providing and/or producing a physiologically functional and/or healthy cell including an osteocyte and/or a chondrocyte and/or an adipocyte and/or a myocyte and/or a keratinocyte and/or a fibrocyte and/or a podocyte and/or a neurocyte and/or a mature endothelial cell and/or a osteoblast and/or a chondroblast and/or a neuroblast and/or a Sertoli cell and/or a Leydig cell and/or a germ cell and/or an endothelial cell and/or an angioblast and/or a fibroblast from a neoplastic cell, particularly within a shorter period of time;
[0050] Re-establishing, restoring and/or reactivating a cell adhesion checkpoint of a neoplastic cell;
[0051] Inducing and/or promoting and/or enhancing neoplastic cell differentiation, particularly within a shorter period of time;
[0052] Inducing and/or promoting and/or enhancing a decrease in Cyclin D gene and protein expression;
[0053] Inducing and/or promoting and/or enhancing a G1 to G0 cell cycle phase transition;
[0054] Inducing and/or promoting and/or enhancing the inactivation of a protein complex between a Cyclin D and at least one of Cyclin-dependent kinase (CDK) 4 or 6;
[0055] Preventing or reducing the phosphorylation of the retinoblastoma (Rb) protein thus activating its tumour suppressor functions;
[0056] Increasing the phosphorylation of the p53 protein thus reducing its degradation and activating its tumor suppressor functions;
[0057] Preventing or reducing the activation of the Ras/MAP kinase signalling cascade;
[0058] Identifying and/or analysing the features and/or markers of a neoplastic cell;
[0059] Regulating and/or activating growth factor receptors of a neoplastic cell;
[0060] Modulating and/or regulating the adhesion between a cell (in particular a neoplastic cell) and its micro-environment i.e. the surrounding extracellular matrix;
[0061] Treating, recoding or converting a neoplastic cell without temporarily or permanently damaging or killing said neoplastic cell and/or without permanently inducing a quiescent state thereof;
[0062] Dampening and/or reducing or suppressing cell division and/or cell proliferation of a neoplastic cell;
[0063] Activating and/or promoting and/or regulating anti-mitogen activity and/or tumor suppressor pathways in a neoplastic cell;
[0064] Inhibiting and/or reducing anti-oncogenic activity in a neoplastic cell;
[0065] Converting or recoding a neoplastic cell to induce and/or promote and/or improve self-healing and/or self-recovery thereof, and/or protecting a subject from a neoplastic disease, disorder, condition or pathology such as cancer using extracellular means;
[0066] Converting or recoding a neoplastic cell to induce and/or promote and/or improve self-healing and/or self-recovery thereof, protecting a subject from a neoplastic disease, disorder, condition or pathology such as cancer without modifying the genome of said cell;
[0067] Providing diagnostic tools for diagnosing neoplastic diseases in a subject.

### I. Definitions

[0068] Those skilled in the art will recognize, or be able to ascertain using no more than routine experimentation, many equivalents to the specific embodiments in accordance with the invention described herein. The scope of the present invention is not intended to be limited to the present description, but rather is as set forth in the appended claims.

[0069] In the claims, articles such as “a”, “an”, and “the” may mean one or more than one unless indicated to the contrary or otherwise evident from the context. Claims or descriptions that include “or” between one or more members of a group are considered satisfied if one, more than one, or all of the group members are present in, employed in, or otherwise relevant to a given product or process unless indicated to the contrary or otherwise evident from the context. The invention includes embodiments in which exactly one member of the group is present in, employed in, or otherwise relevant to a given product or process. The invention includes embodiments in which more than one, or all of the group members are present in, employed in, or otherwise relevant to a given product or process.

[0070] It is also noted that the term “comprising” is intended to be open and permits but does not require the inclusion of additional elements or steps. When the term “comprising” is used herein, the terms “consisting of”, “consisting essentially of”, “consisting substantially of” and “consisting exclusively of” are thus also encompassed and disclosed.

[0071] As used herein, the term “approximately” or “about,” as applied to one or more values of interest, refers to a value that is similar to a stated reference value. In certain embodiments, the term “approximately” or “about” refers to a range of values that fall within 25%, 20%, 19%, 18%, 17%, 16%, 15%, 14%, 13%, 12%, 11%, 10%, 9%, 8%, 7%, 6%, 5%, 4%, 3%, 2%, 1%, or less in either direction (greater than or less than) of the stated reference value unless otherwise indicated, self-evident or contradictory in context (e.g. except where such number would exceed 100% of a possible value).

[0072] As used herein and unless otherwise indicated or contradictory in context, the term “with” followed by a specific number of amino acids, when used to define a particular peptide, variant or analog thereof, such as in “a peptide with three amino acids”, means that such peptide, variant or analog thereof, contains exclusively the specific number of amino acids specified after this term.

[0073] As used herein and unless otherwise indicated or contradictory in context, the term “Ci-alkyl” is intended to specifically and individually disclose any branched or unbranched radical, moiety or functional group having “i” carbon atom(s).

[0074] The carbon atom content of the various hydrocarbon-containing moieties herein may be indicated by a prefix designating the minimum and maximum number of carbon atoms in the moiety. For example, in certain embodiments, (Ca-Cb)alkyl indicates an alkyl moiety of the integer “a” to the integer “b” carbon atoms, inclusive.

[0075] At various places in the present specification, substituents of compounds of the present disclosure may be disclosed in groups or in ranges. It is specifically intended that the present disclosure include each and every individual sub-combination of the members of such groups and ranges. For example, in certain embodiments, the term “C1-C5 alkyl” is an abbreviation for (and thus is specifically intended to individually disclose) C1-alkyl (i.e. methyl), C2-alkyl (i.e. ethyl), C3-alkyl (i.e. 1-propyl and 2-propyl), C4-alkyl (i.e. 1-butyl, sec-butyl, iso-butyl and tert-butyl), and C5-alkyl (i.e. 1-pentyl, 2-pentyl, 3-pentyl, 2-methyl-1-butyl, 3-methyl-1-butyl, 2-methyl-2-butyl, 3-methyl-2-butyl, 2,2-dimethyl-1-propyl and 1,1-dimethyl-1-propyl).

[0076] As used herein, unless indicated otherwise or contradictory in context, the terms “alkyl” and “(Ca-Cb)alkyl” refer to monovalent hydrocarbon radicals containing the requisite number of carbon atoms as described above, having straight or branched moieties or combinations thereof. As used herein, alkyl groups may be optionally substituted with between one to four substitutes. Non-limiting examples of alkyl groups include, e.g. methyl, ethyl, n-propyl, isopropyl, n-butyl, isobutyl, sec-butyl, t-butyl, etc. Of course, other alkyl groups will be readily apparent to those of skilled in the art given the benefit of the present disclosure.

[0077] Where ranges are given, endpoints are included. Furthermore, it is to be understood that unless otherwise indicated or otherwise evident from the context and understanding of one of ordinary skill in the art, values that are expressed as ranges can assume any specific value or sub-range within the stated ranges in different embodiments of the invention, to the tenth of the unit of the lower limit of the range, unless the context clearly dictates otherwise. For example, in certain embodiments, a disclosed 0-10 range would, for example, in certain embodiments, also specifically and individually disclose the following values and ranges: 0, 1, 2, 3, 4, 5, 6, 7, 8, 9, 10, 0.1, 0.2, 0.3, 0.4, 0.5, 0.6, 0.7, 0.8, 0.9, 1, 1.1, 1.2, 1.3, 1.4, 1.5, 1.6, 1.7, 1.8, 1.9, 2, 2.1, 2.2, 2.3, 2.4, 2.5, 2.6, 2.7, 2.8, 2.9, 3, 3.1, 3.2, 3.3, 3.4, 3.5, 3.6, 3.7, 3.8, 3.9, 4, 4.1, 4.2, 4.3, 4.4, 4.5, 4.6, 4.7, 4.8, 4.9, 5, 5.1, 5.2, 5.3, 5.4, 5.5, 5.6, 5.7, 5.8, 5.9, 6, 6.1, 6.2, 6.3, 6.4, 6.5, 6.6, 6.7, 6.8, 6.9, 7, 7.1, 7.2, 7.3, 7.4, 7.5, 7.6, 7.7, 7.8, 7.9, 8, 8.1, 8.2, 8.3, 8.4, 8.5, 8.6, 8.7, 8.8, 8.9, 9, 9.1, 9.2, 9.3, 9.4, 9.5, 9.6, 9.7, 9.8, 9.9, 10, 0-1, 0-2, 0-3, 0-4, 0-5, 0-6, 0-7, 0-8, 0-9, 1-2, 1-3, 1-4, 1-5, 1-6, 1-7, 1-8, 1-9, 2-3, 2-4, 2-5, 2-6, 2-7, 2-8, 2-9, 2-10, 3-4, 3-5, 3-6, 3-7, 3-8, 3-9, 3-10, 4-5, 4-6, 4-7, 4-8, 4-9, 4-10, 5-6, 5-7, 5-8, 5-9, 5-10, 6-7, 6-8, 6-9, 6-10, 7-8, 7-9, 7-10, 8-9, 8-10, 9-10, 0-0.1, 0-0.2, 0-0.3, 0-0.4, 0-0.5, 0-0.6, 0-0.7, 0-0.8, 0-0.9, 0-1.1, 0-1.2, etc.

[0078] As used herein and unless otherwise indicated or contradictory in context, the term “substantially” refers to the qualitative condition of exhibiting total or near-total extent or degree of a characteristic or property of interest. One of ordinary skill in the biological arts will understand that biological and chemical phenomena rarely, if ever, go to completion and/or proceed to completeness or achieve or avoid an absolute result. The term “substantially” is therefore used herein to capture the potential lack of completeness inherent in many biological and chemical phenomena.

[0079] In addition, it is to be understood that any particular embodiment of the present invention that falls within the prior art may be explicitly excluded from any one or more of the claims using the appropriate disclaimer(s) or proviso(s). Since such embodiments are deemed to be known to one of ordinary skill in the art, they may be excluded even if the exclusion is not set forth explicitly herein. Any particular embodiment of the compositions of the invention (e.g., any peptide or peptidomimetic; any method of production; any method of use; etc.) can be excluded from any one or more claims, for any reason, whether or not related to the existence of prior art.

[0080] All cited sources, for example, in certain embodiments, references, publications, databases, database entries, and art cited herein, are incorporated into this application by reference in their entirety, even if not expressly stated in the citation. In case of conflicting statements of a cited source and the instant application, the statement in the instant application shall control.

[0081] As the case may be, and unless otherwise indicated or contradictory in context, macromolecules molecular weights should be understood in the present description as being number averaged molecular weights.

[0082] The peptides mentioned in the present description may not follow the usual representation conventions. For instance, the N-terminal amino acid of a peptide sequence may be the first amino acid in the sequence or the last amino acid. Likewise, the C-terminal amino acid of a peptide sequence may be the first amino acid in the sequence or the last amino acid. For example, in the peptide sequence NAIS, “N” may be N-terminal or C-terminal, and “S” may be N-terminal or C-terminal. Consequently, for the purpose of the present disclosure, e.g. NAIS also covers SIAN, SAIS also covers SIAS, SPIN also covers NIPS, etc.

[0083] In the present application, when reference is made to a certain peptide (e.g. a GFR-binding compound as provided herein) comprising one or more other peptide(s), said one or more other peptide(s) is(are) understood to be stably (in most cases, covalently) attached/bound to at least one part of said peptide.

[0084] The attachment/binding may be located anywhere on the peptide unless indicated otherwise, contradictory in context or contradictory to general scientific rules. No specific attachment/binding location of said one or more other peptide(s) to said peptide shall be assumed unless specifically mentioned.

[0085] Peptide or polypeptide: As used herein, the term “peptide” or “polypeptide” are used interchangeably and refers to a polymer of less than or equal to 100 amino acids long, e.g., about 2, 3, 4, 5, 10, 15, 20, 25, 30, 35, 40, 45, 50, 55, 60, 65, 70, 75, 80, 85, 90, 95 or 100 amino acids long. The terms apply to amino acid polymers in which one or more amino acid residue is an artificial chemical mimetic of a corresponding naturally occurring amino acid, as well as to naturally occurring amino acid polymers, non-naturally occurring amino acid polymers, peptide analogs, peptide variants and peptide mimetics.

[0086] Conventional techniques for synthesising peptides involve the activation of the carboxylic acid function of an amino acid or of a peptide, using a coupling agent. This activated acid is then contacted with an amino acid or a peptide in which the N-terminal amino acid is not protected, thus forming an amide bond also called peptide bond. Coupling reaction conditions together with coupling agents are well known in the art and described, for instance, in Greene, “Protective Groups in Organic Synthesis”, Wiley, New York, 2007 4th edition. In addition, suitable peptide synthesis routes are described, for instance, in Hojo H., Recent progress in the chemical synthesis of proteins, Curr Opin Struct Biol. 2014; 26C:16-23 and Saranya Chandrudu, et al., Chemical Methods for Peptide and Protein Production, Molecules, 2013, 18, 4373-4388, each of which is incorporated herein by reference in its entirety. There are two main strategies for peptide synthesis i.e. liquid-phase peptide synthesis and solid-phase peptide synthesis (SPPS) which is now most commonly used for peptide synthesis. Instead of C-terminal protection with a chemical group, the C-terminus of the first amino acid is coupled to an activated solid support, such as polystyrene or polyacrylamide. This type of approach has a two-fold function: the resin acts as the C-terminal protecting group and provides a rapid method to separate the growing peptide product from the different reaction mixtures during synthesis. As with many different biological manufacturing processes, peptide synthesizers have been developed for automation and high-throughput peptide production. SPPS allows the synthesis of natural peptides which are difficult to express in bacteria, the incorporation of unnatural amino acids, peptide/protein backbone modification, and the synthesis of D-proteins, which consist of D-amino acids. Very long peptide can be accessed by using native chemical ligation to couple two peptides together with quantitative yields.

[0087] Peptide analogs: As used herein, unless indicated otherwise or contradictory in context, the term “peptide analogs” refers to polypeptide variants which differ by one or more amino acid alterations, e.g., substitutions, additions or deletions of amino acid residues that still maintain one or more of the properties of the parent or starting peptide.

[0088] Peptide variants: As used herein, unless indicated otherwise or contradictory in context, the term “peptide variants” refers to a peptide which has a certain identity with a native or reference compound sequence. In one example, the peptide variant refers to any post-administration, application, injection modified peptide. Such post-administration, application, injection modifications include, but are not limited to, phosphorylation, acetylation, glutamylation, tyrosination, palmitoylation, glycosylation, myristoylation, palmitoylation, isoprenylation, glypiation, lipoylation, phosphopantetheinylation, acylation, alkylation, amidation, arginylation, polyglutamylation, polyglycylation, butyrylation, gamma-carboxylation, glycosylation, polysialylation, malonylation, hydroxylation, iodination, nucleotide addition, oxidation, adenylylation, propionylation, pyroglutamate formation, S-glutathionylation, S-nitrosylation, succinylation, sulfation, glycation, biotinylation, pegylation, ISGylation, SUMOylation, ubiquitination, Neddylation, Pupylation, citrullination, deamidation, eliminylation, carbamylation, and racemization.

[0089] Peptido-mimetic: As used herein, unless indicated otherwise or contradictory in context, the term “peptido-mimetic” or “peptidomimetic” refers to a synthetic chemical compound which comprises amino acids but not only and that is able to mimic the biological action of a peptide, often because the mimetic has a basic structure that mimics the basic structure of the peptide and/or has the salient biological properties of that peptide. In one particular example, a peptidomimetic is a hybrid molecule containing both, at least one peptide, and at least one of a polysaccharide, a polynucleotide or a linear or branched, saturated or unsaturated, hydrocarbon chain.

[0090] Linear peptide: As used herein, unless indicated otherwise or contradictory in context, the term “linear peptide” means a peptide in which the C-terminal and the N-terminal amino acid residues do not covalently interact with each other and none of the C-terminal or the N-terminal amino acid residues covalently interacts with another amino acid residue of the peptide chain.

[0091] Cyclic peptide: As used herein, unless indicated otherwise or contradictory in context, the term “cyclic peptide” means peptide in which the C-terminal and N-terminal amino acid residues do covalently interact with each other or the C-terminal and/or the N-terminal amino acid residues covalently interact with at least one other amino acid residue of the peptide chain so as to form a ring-like structure.

[0092] Amino acid: As used herein, unless indicated otherwise or contradictory in context, the term “amino acid” refers to naturally occurring and non-naturally occurring amino acids including amino acid analogs. Naturally occurring amino acids are those encoded by the genetic code, as well as those amino acids that are later modified, e.g., hydroxyproline, [gamma]-carboxyglutamate, and O-phosphoserine. Naturally encoded amino acids are the 20 common amino acids glycine (Gly, G), alanine (Ala, A), valine (Val, V), leucine (Leu, L), isoleucine (Ile, I), serine (Ser, S), threonine (Thr, T), phenylalanine (Phe, F), tyrosine (Tyr, Y), tryptophane (Trp, W), cysteine (Cys, C), methionine (Met, M), proline (Pro, P), aspartic acid (Asp, D), asparagine (Asn, N), glutamine (Gln, Q), glutamic acid (Glu, E), histidine (His, H), arginine (Arg, R) et lysine (Lys, K) and pyrrolysine and selenocysteine. Non-naturally occurring amino acids include, but are not limited to, the dextrogyre (D) isomers of the above-cited naturally-occurring amino acids. Amino acid analogs refers to compounds that have the same basic chemical structure as a naturally occurring amino acid i.e., an [alpha] carbon that is bound to a hydrogen, a carboxyl group, an amino group, and an R group (i.e. side chain), and which may be used in replacement thereof without substantially affecting the overall function of the peptide to which it belongs. Amino acid analogs (or non-naturally occurring amino acids) that may be suitable for implementing embodiments of the present invention include, but are not limited to, amino acids comprising a photoactivatable cross-linker, spin-labeled amino acids, fluorescent amino acids, metal binding amino acids, metal-containing amino acids, radioactive amino acids, amino acids with novel functional groups, amino acids that covalently or noncovalently interact with other molecules, photocaged and/or photoisomerizable amino acids, amino acids comprising biotin or a biotin analogue, glycosylated amino acids such as a sugar substituted serine, other carbohydrate modified amino acids, keto-containing amino acids, amino acids comprising polyethylene glycol or polyether, heavy atom substituted amino acids, chemically cleavable and/or photocleavable amino acids, amino acids with an elongated side chains as compared to natural amino acids, including but not limited to, polyethers or long chain hydrocarbons, including but not limited to, greater than about 5 or greater than about 10 carbons, carbon-linked sugar-containing amino acids, redox-active amino acids, amino thioacid containing amino acids, and amino acids comprising one or more toxic moiety. The term “AA^{I}” (AA roman numeral one) may be used in the description and refers to an amino acid which may be any amino acid as defined above in particular any naturally occurring and non-naturally occurring amino acids.

[0093] Amino acid side chain: As used herein, unless indicated otherwise or contradictory in context, the term “amino acid side chain” means the functional group of an amino acid that differentiates it from other amino acids. All amino acid structures have a carboxyl group, an amine group and a specific side chain.

[0094] AA^{II} (AA roman numeral two): As used herein, unless indicated otherwise or contradictory in context, the terms “polar amino acid” or “AA^{II}” means amino acids having a polar, non-charged group-containing side chain. Polar amino acids are protonated at physiological pH (about 7). Examples of polar amino acids include, but are not limited to, Cys (C), Asn (N), Gin (Q), Ser (S), Thr (T), or Tyr (Y).

[0095] AA^{III} (AA roman numeral three): As used herein, unless indicated otherwise or contradictory in context, the terms “acidic amino acid” or “AA^{III}” means amino acids having an acidic group-containing side chain. Acidic amino acid deprotonated forms predominate at physiological pH (about 7). Examples of acidic amino acids include, but are not limited to, Asn (N) and Glu (E).

[0096] AA^{IV} (AA roman numeral four): As used herein, unless indicated otherwise or contradictory in context, the terms “aliphatic amino acid” or “AA^{IV}” means amino acids having an aliphatic side chain. Examples of aliphatic amino acids include, but are not limited to, Ala (A), Leu (L), lie (I), Gly (G), Val (V) and any analogs and derivatives thereof.

[0097] AA^{V} (AA roman numeral five): As used herein, unless indicated otherwise or contradictory in context, the terms “apolar amino acid” or “AA^{V}” means amino acids having an apolar side chain. Examples of apolar amino acids include, but are not limited to, Ala (A), Phe (F), Gly (G), lie (I), Leu (L), Met (M), Pro (P), Val (V) or Trp (W).

[0098] AA^{VI}(AA roman numeral six): As used herein, unless indicated otherwise or contradictory in context, the term “aromatic amino acid” or “AA^{VI}” means amino acids having an aromatic group-containing side chain. Examples of aromatic amino acids include, but are not limited to, Trp (W), Tyr (Y) or Phe (F).

[0099] AA^{VII} (AA roman numeral seven): As used herein, unless indicated otherwise or contradictory in context, the term “basic amino acid” or “AA^{VII}” means amino acids having a basic group-containing side chain. Basic amino acid protonated forms predominate at physiological pH (about 7). Examples of basic amino acids include, but are not limited to, Arg (R), His (H), or Lys (K).

[0100] AA^{VIII} (AA roman numeral eight): As used herein, unless indicated otherwise or contradictory in context, the term “AA^{VIII}” means Leu (L) or lie (I) and any analogs and derivatives thereof.

[0101] AA^{IX} (AA roman numeral nine): As used herein, unless indicated otherwise or contradictory in context, the term “charged amino acid” or “AA^{IX}” means amino acids having either an acidic group-containing side chain or an basic group-containing side chain. Charged amino acid charged forms predominate at physiological pH (about 7). Examples of charged amino acids include, but are not limited to, Asn (N), Glu (E), His (H), Lys (K) or Arg (R).

[0102] AAⁿ: As used herein, unless indicated otherwise or contradictory in context, the term “AAⁿ”, in which n is a positive integer arbitrarily chosen to identify a specific position within the primary sequence of a peptide. For instance, AA¹³ means the amino acid of position 13. The terms “amino acid” and “AA” are interchangeably used in the present description.

[0103] N-terminal: As used herein, unless indicated otherwise or contradictory in context, the term “N-terminal” means the amine (—NH₂) function/group/moiety located at one (terminal) end of a protein or polypeptide. This functional group is the only amine group which is not engage in n amide peptide bond.

[0104] C-terminal: As used herein, unless indicated otherwise or contradictory in context, the term “C-terminal” means the carboxylate (—CO₂H) function/group/moiety located at one (terminal) end of a protein or polypeptide. This functional group is the only carboxylic acid group which is not engage in n amide peptide bond.

[0105] Naturally-occurring peptide: As used herein, unless indicated otherwise or contradictory in context, the terms “naturally-occurring peptide” or “natural peptide” means a peptide which may be found in nature without human direct intervention (except for its extraction and/or isolation).

[0106] Synthetic peptide: As used herein, unless indicated otherwise or contradictory in context, the terms “synthetic peptide” or “non-natural peptide” means a peptide which may not be found in nature without human direct intervention (except for its extraction and/or isolation). For example, in certain embodiments, a synthetic peptide may have the amino acid sequence of a natural peptide except for at least one amino acid deletion or substitution relative to the natural sequence. In the case of a substitution, an amino acid from the natural sequence is replaced by another, different, naturally-occurring or non-naturally occurring amino acid. For example, in certain embodiments, a synthetic peptide may not possess a post-translational modification of the natural peptide such as the attachment of an acetate group, a phosphate group, a lipid, a carbohydrate, or the formation of a disulfide bridge.

[0107] Covalent interaction: As used herein, unless indicated otherwise or contradictory in context, the term “interact covalently”, “covalent interaction” or “covalent bond” are interchangeably used and means a chemical bond or interaction that involves the sharing of electron pairs between atoms. Examples of such interactions are σ-bonding and π-bonding.

[0108] Non-covalent interaction: As used herein, unless indicated otherwise or contradictory in context, the term “interact non-covalently”, “non-covalent interaction” or “non-covalent bond” are interchangeably used and means a chemical bond or interaction that does not involve the sharing of electron pairs between atoms but rather involves more dispersed variations of electromagnetic interactions between molecules or within a molecule. Non-covalent interactions can be generally classified into four categories, electrostatic interactions, i-interactions, van der Waals forces, and hydrophobic interactions.

[0109] Electrophile: As used herein, unless indicated otherwise or contradictory in context, the term “electrophile” means an organic molecule attracted to electrons that participates in a chemical reaction by accepting an electron pair in order to bond to a nucleophile. Most electrophiles are positively charged, have an atom that carries a partial positive charge, or have an atom that does not have an octet of electrons.

[0110] Nucleophile: As used herein, unless indicated otherwise or contradictory in context, the term “nucleophile” means an organic molecule that donates an electron pair to an electrophile to form a chemical bond in relation to a reaction. All molecules or ions with a free pair of electrons or at least one pi bond can act as nucleophiles.

[0111] Polysaccharide: As used herein, unless indicated otherwise or contradictory in context, the term “polysaccharide” means polymeric carbohydrate molecules composed of long chains of monosaccharide units bound together by glycosidic linkages and which upon hydrolysis provide monosaccharides or oligosaccharides. They range in structure from linear to highly branched polymers.

[0112] Polynucleotide: As used herein, the term “polynucleotide” or “nucleic acid”, which are used interchangeably, refers to the phosphate ester polymeric form of ribonucleosides (“RNA molecules”) or deoxyribonucleosides (“DNA molecules”), or any phosphoester analogs thereof, such as phosphorothioates and thioesters, in either single stranded form, or a double-stranded helix. The term “nucleic acid” includes double-stranded DNA round, inter alia, in linear (e.g., restriction fragments) or circular DNA molecules. In particular, nucleic acids as used herein refer to nucleic acids such as RNAs encoding for agonist of growth factor receptors as defined herein.

[0113] Nucleoside: As used herein, the term “nucleoside” refers to a compound containing a sugar molecule (e.g., a pentose or ribose) or derivative thereof in combination with an organic base (e.g., a purine or pyrimidine) or a derivative thereof (also referred to herein as “nucleobase”).

[0114] Nucleotide: As used herein, the term “nucleotide” refers to a nucleoside including a phosphate group.

[0115] Dendrimer: As used herein, unless indicated otherwise or contradictory in context, the term “dendrimer” means any repetitively branched molecules. Examples of dendrimers are phosphorous dendrimers, polylysine dendrimers, polypropylenimine dendrimers and PAMAM dendrimers, such as the ones described, for instance, in Scientific World Journal. 2013; 2013:732340; Curr Opin Chem Biol. 1998; 2(6):733-42; J Pept Sci. 1999; 5(5):203-20; and J Pept Sci. 2008; 14(1):2-43, which may be used for implementing embodiments of the present invention, each of which being herein incorporated by reference in its entirety.

[0116] Synthetic molecule: As used herein, unless indicated otherwise or contradictory in context, the term “synthetic molecule” means a molecule which may not be found in nature without human direct intervention (except for its extraction and/or isolation).

[0117] Synthetic polymers: As used herein, unless indicated otherwise or contradictory in context, the term “synthetic polymer” refers to a macromolecule or polymer which may not be found in nature without human direct intervention (except for its extraction and/or isolation).

[0118] Biocompatible: As used herein, unless indicated otherwise or contradictory in context, the term “biocompatible” means compatible with living cells, tissues, organs or systems posing little to no risk of injury, toxicity or rejection by the immune system.

[0119] Biologically active: As used herein, unless indicated otherwise or contradictory in context, the term “biologically active” refers to a characteristic of any substance that has activity in a biological system and/or organism. For instance, a substance that, when administered to an organism, has a biological effect on that organism, is considered to be biologically active. In particular examples, a compound, substance or pharmaceutical composition of the present disclosure may be considered biologically active even if a portion of the compound, substance or pharmaceutical composition is biologically active or mimics an activity considered biologically relevant.

[0120] Stem cells: As used herein, unless indicated otherwise or contradictory in context, the term “stem cell” refers to the term as it is generally understood in the art. For example, in certain embodiments, stem cells, regardless of their source, are cells that are capable of dividing and renewing themselves for long periods, are at least to a degree unspecialized (undifferentiated), and can give rise to (differentiate into) specialized cell types (i.e., they are progenitor or precursor cells for a variety of different, specialized cell types).

[0121] Mesenchymal stem cells: As used herein, unless indicated otherwise or contradictory in context, the term “mesenchymal stem cells” generally means multipotent adult stromal cells that can differentiate into a variety of cell types, such as osteoblasts, chondrocytes, and adipocytes.

[0122] Stem cell-like: As used herein, unless indicated otherwise or contradictory in context, the term “Stem cell-like” refers to a cell which is not a stem cell by its origin but functions as a stem cell and presents similar characteristics such as, for example, the expression of stemness markers like Stro-1 and/or is multipotent thus has the ability to differentiate into various cell types.

[0123] Progenitor cells: As used herein, unless indicated otherwise or contradictory in context, the term “progenitor cells” generally means a biological cell that, like any stem cell, has a tendency to differentiate into a specific type of cell, but is already more specific than a stem cell and is pushed to differentiate into its “target” cell. Stem cells can generally replicate indefinitely, whereas progenitor cells can divide only a limited number of times.

[0124] Adult stem cells: As used herein, unless indicated otherwise or contradictory in context, the term “adult stem cells” means undifferentiated cells, found throughout the body after development, that multiply by cell division to replenish dying cells and regenerate damaged tissues. Also known as somatic stem cells, they can be found in juvenile as well as adult animals and human bodies.

[0125] Differentiation: As used herein, unless indicated otherwise or contradictory in context, the term “differentiation” refers to the process by which a less specialized cell becomes a more specialized cell type and involves a switch from one gene expression pattern to another.

[0126] Differentiated cells: As used herein, unless indicated otherwise or contradictory in context, the term “differentiated cells” generally means any cell of a specific lineage at the exception of cells containing stem cell specific markers.

[0127] Non-terminally differentiated: As used herein, unless indicated otherwise or contradictory in context, the term “non-terminally differentiated”, when used in relation to a cell, refers to a differentiated cell as defined herein which has not reached its final state of differentiation. For example, in certain embodiments, in the Osteoblast cell lineage, a non-terminally differentiated cell is any differentiated cell of the lineage at the exception of an osteocyte.

[0128] Terminally differentiated: As used herein, unless indicated otherwise or contradictory in context, the term “terminally differentiated”, when used in relation to a cell, refers to a differentiated cell as defined herein which has reached its final state of differentiation. For example, in certain embodiments, in the Osteoblast cell lineage, a terminally differentiated cell is an osteocyte.

[0129] Methods for obtaining stem cells: Methods for obtaining such stem cells and providing initial culture conditions, such as a liquid culture or semi-solid culture medium, are known in the art. The cells are initially expanded in vivo or in vitro, by contacting the source of the stem cells with a suitable reagent that expands or enriches such cells in the tissue source or in culture. Preferably, adult stem cells are isolated from a tissue source and then expanded or enriched in vitro by exposure to a suitable agent. Cells are obtained from an individual by any suitable method for obtaining a cell sample from an animal, including, but not limited, to, collection of bone marrow collection of a bodily fluid (e.g., blood), collection of umbilical cord blood, tissue punch, and tissue dissection, including particularly, but not limited to, any biopsies of skin, intestine, cornea, spinal cord, brain tissue, scalp, stomach, breast, lung (e.g., including lavage and bronchioschopy), fine needle aspirates of the bone marrow, amniotic fluid, placenta and yolk sac.

[0130] Cell lineage: As used herein, unless indicated otherwise or contradictory in context, the term “cell lineage” refers to the developmental history of a particular cell from its primary state in the fertilized egg or embryo through to its fully differentiated state. The different steps and phases involved in the development of a cell produces many intermediate cells which may be referred to as progenitor or precursor cells in the present application and form an integral part of the cell lineage.

[0131] Bone: It is conventionally known that mature osteoblasts are the cells responsible for bone formation and are derived from osteoblast precursors. Differentiation of human bone marrow mesenchymal stem cells and osteoblast precursors is one of the important processes for bone regeneration. Osteoblasts differentiate from mesenchymal stem cells. Mature osteoblasts differentiate from osteoblast precursors and into osteocytes which are non-dividing cells. Bone-related neoplastic diseases include, but are not limited to, bone primary tumors (benign tumors or cancers) such as osteoma, osteoid osteoma, osteochondroma, osteoblastoma, enchondroma, giant cell tumor of bone, aneurysmal bone cyst, fibrous dysplasia of bone, osteosarcoma, chondrosarcoma, Ewing's sarcoma, fibrosarcoma; and secondary tumors (i.e. metastasize) such as, for example, in certain embodiments, carcinomas of the prostate, breasts, lungs, thyroid, and kidneys.

[0132] Osteoblast cell lineage: As used herein, unless indicated otherwise or contradictory in context, the term “osteoblast cell lineage” refers to bone cells at any stage of their development and thus include, but are not limited to, mesenchymal stem cells, osteoblasts, osteocytes or any precursors thereof.

[0133] Cartilage: Native chondrocytes are responsible for the synthesis and turnover of the cartilage extracellular matrix (ECM), which provides an environment of nutrition diffusion for chondrocytes and provides the joint surface with biomechanical competence. Chondrogenic cells arise from pluripotential adult mesenchymal stem cells (MSCs) through a series of differentiation pathways. Chondrogenic differentiation of MSCs is induced by various intrinsic and extrinsic factors. Growth factors play an important role in this process. For instance, in the hyaline cartilage, growth factors regulate homeostasis and integrity, as well as development. Cartilage-related neoplastic diseases include, but are not limited to, Chondroma/ecchondroma/enchondroma (Enchondromatosis, Extraskeletal chondroma), Chondrosarcoma (Mesenchymal chondrosarcoma, Myxoid chondrosarcoma), Osteochondroma (Osteochondromatosis), Chondromyxoid fibroma, and Chondroblastoma, Chondrocytic cell lineage: As used herein, unless indicated otherwise or contradictory in context, the term “chondrocytic cell lineage” refers to cartilage cells at any stage of their development and thus include, but are not limited to, mesenchymal stem cells, chondroblasts, chondrocytes or any precursors thereof.

[0134] Muscles: Skeletal muscle is a highly complex and heterogeneous tissue serving a multitude of functions in the organism. The process of generating muscle—myogenesis—can be divided into several distinct phases. During embryonic myogenesis, mesoderm-derived structures generate the first muscle fibers of the body proper, and in subsequent waves additional fibers are generated along these template fibers. In the perinatal phase, muscle resident myogenic progenitors initially proliferate extensively but, later on, decrease as the number of myonuclei reaches a steady state and myofibrillar protein synthesis peaks.

[0135] Once the muscle has matured, these progenitors will enter quiescence and henceforth reside within it as satellite cells. Adult skeletal muscle, like all renewing organs, relies on a mechanism that compensates for the turnover of terminally differentiated cells to maintain tissue homeostasis. This type of myogenesis depends on the activation of satellite cells that have the potential to differentiate into new fibers. The most comprehensively studied form of myogenesis takes place when mature muscle is damaged and large cohorts of satellite cells expand mitotically and differentiate to repair the tissue and reestablish homeostasis. It is now generally accepted that satellite cells are closely related to progenitors of somitic origin. The activation of the network of transcription factors that controls skeletal muscle development depends on paracrine factors that are released by adjacent tissues, such as the neural tube, notochord, surface ectoderm and lateral mesoderm. Several secreted factors have been identified that determine the spatial and temporal onset of myogenesis. Signalling molecules, such as Noggin and bone morphogenetic proteins (BMPs)—which inactivate and activate receptors of the transforming growth factor-β (TGFβ) superfamily, respectively—are reported to participate in the orchestration of the activation of myogenesis. Muscle-related neoplastic diseases include, but are not limited to, Rhabdomyosarcoma, and Leiomyosarcoma.

[0136] Muscle cell lineage: As used herein, unless indicated otherwise or contradictory in context, the term “muscle cell lineage” refers to muscle cells at any stage of their development and thus include, but are not limited to, mesenchymal stem cells, myoblasts, myocytes or any precursors thereof.

[0137] Vascular: The vasculature in the human body forms through two distinct processes: vasculogenesis and angiogenesis. Vasculogenesis is defined as the process of de novo blood vessel formation occurring when endothelial precursor cells (angioblasts) migrate and differentiate into endothelial cells which form the new vessel. These vascular trees are then extended through angiogenesis which is defined as the new vessel formation secondary to proliferation of endothelial cells from pre-existing vessels.

[0138] Vasculogenesis as well as angiogenesis occur during the embryologic development of the circulatory system but also in the adult organism from circulating endothelial progenitor cells (derivatives of stem cells) able to contribute, albeit to varying degrees, to neovascularization. Vascular-related neoplastic diseases include, but are not limited to, Hemangiosarcoma, Kaposi's sarcoma, Lymphangiosarcoma, and Infantile hemangio-pericytoma.

[0139] Vascular cell lineage: As used herein, unless indicated otherwise or contradictory in context, the term “vascular cell lineage” refers to vascular cells at any stage of their development and thus include, but are not limited to, mesenchymal stem cells, angioblast, pericytes and endothelial cells or any precursors thereof.

[0140] Neurons: It was recently reported that neural cells can be regenerated from neural stem cells (NSCs). These are self-renewing, multipotent adult stem cells that generate the main phenotype of the nervous system. They undergo asymmetric cell division into two daughter cells, one non-specialized and one specialized. NSCs primarily differentiate into neurons, astrocytes, and oligodendrocytes. NSCs are generated throughout an adult's life via the process of neurogenesis. NSCs can be differentiated to replace lost or injured neurons or in many cases even glial cells. NSCs are stimulated to begin differentiation via exogenous cues from their microenvironment, or the neural stem cell niche. This niche defines a zone in which stem cells are retained after embryonic development for the production of new cells of the nervous system. This continual supply of new neurons and glia then provides the postnatal and adult brain with an added capacity for cellular plasticity. Critical to the maintenance of the stem cell niche are microenvironmental cues and cell-cell interactions that act to balance stem cell quiescence with proliferation and to direct neurogenesis versus gliogenesis lineage decisions. Several proteins like different growth factors are involved in the mechanisms of the neural stem cell niche as well as in the maintenance and growth of the newly formed neurons. These include the BMPs, FGFs, PDGF, VEGF, TGF β, BDNF and others. Neuron-related neoplastic diseases include, but are not limited to, Anaplastic astrocytoma, Astrocytoma, Central neurocytoma, Choroid plexus carcinoma, Choroid plexus papilloma, Choroid plexus tumor, Dysembryoplastic neuroepithelial tumour, Ependymal tumor, Fibrillary astrocytoma, Giant-cell glioblastoma, Glioblastoma multiforme, Gliomatosis cerebri, Gliosarcoma, Hemangiopericytoma, Medulloblastoma, Medulloepithelioma, Meningeal carcinomatosis, Neuroblastoma, Neurocytoma, Oligoastrocytoma, Oligodendroglioma, Optic nerve sheath meningioma, Pediatric ependymoma, Pilocytic astrocytoma, Pinealoblastoma, Pineocytoma, Pleomorphic anaplastic neuroblastoma, Pleomorphic xanthoastrocytoma, Primary central nervous system lymphoma, Sphenoid wing meningioma, Subependymal giant cell astrocytoma, Subependymoma, and Trilateral retinoblastoma.

[0141] Neuronal cell lineage: As used herein, unless indicated otherwise or contradictory in context, the term “neuron lineage” refers to brain cells at any stage of their development and thus include, but are not limited to, neural stem cells, neuroblast, neurocyte and neuroglial cells or any precursors thereof.

[0142] Eye retina: The vertebrate retina is a light-sensitive layer of tissue, lining the inner surface of the eye. Retinal development involves a complex progression of tissue induction, proliferation of retinal progenitor cell (RPC) populations and terminal differentiation of these cells into specific functional types. Bone morphogenetic protein (BMP), is a member of the transforming growth factor (TGF)-β family of signaling molecules plays an important role in the retinal cell development. BMP-2, -4, and -7 and their receptors (BMPRs) are expressed in the eye during embryogenesis and are essential for multiple aspects of retinal development. Retina-related neoplastic diseases include, but are not limited to, Retinoblastoma. It should also be noted that eye cancers can be primary (starts within the eye) and metastatic (spread to the eye from another organ). The two most common cancers that would spread to the eyes from another organ are breast cancer and lung cancer. Other, less common, sites of origin include prostate, kidney, thyroid, skin, colon and blood or bone marrow.

[0143] Retinal cell lineage: As used herein, unless indicated otherwise or contradictory in context, the term “retinal cell lineage” refers to eye retina cells at any stage of their development and thus include, but are not limited to, photoreceptor, bipolar cells, rod and cone cells or any precursors thereof.

[0144] Kidneys: The kidneys are composed of complex tissues consisting of several different cell types including glomerular podocytes, endothelial cells, mesangial cells, interstitial cells, tubular epithelial cells, and connecting duct cells. These cell types interact to establish a precise cellular environment that functions as an efficient tissue. Kidneys-related neoplastic diseases include, but are not limited to, Squamous cell carcinoma, Juxtaglomerular cell, tumor (reninoma), Angiomyolipoma, Renal oncocytoma, Bellini duct carcinoma, Clear-cell sarcoma of the kidney, Mesoblastic nephroma, Wilms' tumor, Mixed epithelial stromal tumor, Clear cell adenocarcinoma, Transitional cell carcinoma, Inverted papilloma, Renal lymphoma, Teratoma, Carcinosarcoma, and Carcinoid tumor.

[0145] Renal cell lineage: As used herein, unless indicated otherwise or contradictory in context, the term “renal cell lineage” refers to renal cells at any stage of their development and thus include, but are not limited to, mesenchymal stem cells, podocytes, or any precursors thereof.

[0146] Ligaments and Tendons: Tendons and ligaments (T/L) are dense connective tissues of mesodermal origin. They connect and transmit force from muscle to bone and bone to bone, respectively. Both tissues are able to store elastic energy and withstand hightensile forces, on which locomotion is entirely dependent. T/L are predominantly composed of collagen type I fibrils organized in a highly hierarchical manner that is unique for the T/L. Other collagens (types III-VI, XI, XII, XIV, and XV) and various proteoglycans (decorin, cartilage oligomeric matrix protein (COMP), byglican, lumican, fibromodulin, tenascin-C, etc.) are building the remaining T/L substance. The cellular content of T/L is dominated by tendon-specific fibroblasts named tenocytes. During embryonic development, the tendon-specific cells descend from a sub-set of mesenchymal progenitors condensed in the syndetome, a dorsolateral domain of the sclerotome. L/T-related neoplastic diseases include, but are not limited to, Fibrosarcoma, Malignant fibrous, Hystiocytoma, and Dermatofibrosarcoma.

[0147] Ligament and tendon cell lineage: As used herein, unless indicated otherwise or contradictory in context, the term “ligament and tendon cell lineage” or “L/T cell lineage” refers to bone or cartilage cells at any stage of their development and thus include, but are not limited to, mesenchymal stem cells, fibroblasts, fibrocytes, or any precursors thereof.

[0148] Skin: The skin constantly renews itself throughout adult life. Stem cells (SCs) residing in the epidermis ensure the maintenance of adult skin homeostasis, but they also participate in the repair of the epidermis after injuries. The skin protects the body from dehydration, injury and infection. The skin consists of an underlying dermis, separated by a basement membrane from the multilayered overlaying epidermis. The dermis is of mesodermal embryonic origin and contains as adult stem cells fibroblastic mesenchymal stem-cell-like cells. These cells have a multi-lineage differentiation potential, being also able to form adipose tissue or bones. Skin-related neoplastic diseases include, but are not limited to, basal cell carcinoma, squamous cell carcinoma, malignant melanoma, dermatofibrosarcoma protuberans, Merkel cell carcinoma, Kaposi's sarcoma, keratoacanthoma, spindle cell tumors, sebaceous carcinomas, microcystic adnexal carcinoma, Paget's disease of the breast, atypical fibroxanthoma, leiomyosarcoma, and angiosarcoma.

[0149] Fibroblast lineage: As used herein, unless indicated otherwise or contradictory in context, the term “fibroblast lineage” refers to skin cells at any stage of their development and thus include, but are not limited to, mesenchymal stem cells, fibroblasts, keratinocytes, Merkel cells, melanocytes, Langerhans cells, and any precursor cells thereof.

[0150] Reproduction: Reproduction (or procreation) is the biological process by which new offspring individual organisms are produced from their parents. Sexual reproduction is a biological process by which organisms create descendants that have a combination of genetic material contributed from two (usually) different members of the species. The development and physiological functions of basic structures in the mammalian reproductive system are influenced by the tissue-specific expression of members of different growth factors families like the BMP family. The establishment of the germ line is a fundamental aspect of reproduction. Germ cell determination is induced in epiblast cells by the extraembryonic ectoderm, and is not acquired through the inheritance of preformed germ plasma. There is some strong evidence that BMP-4 and -8b play a central role in determining primordial germ cell (PGC) formation in the embryo. The genes encoding BMP-4 and -8b have overlapping expression in the extraembryonic ectoderm before gastrulation, i.e., before PGCs are seen. Thus, PGC formation requires BMP-4 expression. There is also evidence from knockout mammals that BMP-8b is required for PGC formation. Furthermore, there is increasing evidence that locally produced BMPs play a major role in the differentiation of the pituitary gonadotrope. Reproduction-related neoplastic diseases include, but are not limited to, Prostate cancer, Ovary cancer (adenocarcinoma, or glandular cancer) also known as carcinoma of the prostate or prostatic intraepithelial neoplasia.

[0151] Reproduction system lineage: As used herein, unless indicated otherwise or contradictory in context, the term “reproduction system lineage” refers to Sertoli cells, Leydig cell and Germ cell at any stage of their development, in particular, mesenchymal stem cells.

[0152] Blood: Blood is a bodily fluid in animals that delivers necessary substances such as nutrients and oxygen to the cells and transports metabolic waste products away from those cells. When it reaches the lungs, gas exchange occurs wherein carbon dioxide is diffused out of the blood into the alveoli and oxygen is diffused into the blood. This oxygenated blood is pumped to the left hand side of the heart in the pulmonary vein and enters the left atrium. From here it passes through the bicuspid valve, through the ventricle and taken all around the body by the aorta. Blood contains antibodies, nutrients, oxygen and much more to help the body work. In vertebrates, it is composed of blood cells suspended in blood plasma. Plasma, which constitutes 55% of blood fluid, is mostly water (92% by volume), and contains dissipated proteins, glucose, mineral ions, hormones, carbon dioxide (plasma being the main medium for excretory product transportation), and blood cells themselves. Albumin is the main protein in plasma, and it functions to regulate the colloidal osmotic pressure of blood. Hematopoietic stem cells (HSCs) are the blood cells that give rise to all the other blood cells and are derived from the mesoderm. They are located in the red bone marrow, which is contained in the core of most bones. The HSCs give rise to the myeloid lineage (monocytes and macrophages, neutrophils, basophils, eosinophils, erythrocytes, megakaryocytes/platelets, dendritic cells), and to the lymphoid lineages (T-cells, B-cells, NK-cells). The most abundant cells in the vertebrate blood are red blood cells (also called RBSs or erythrocytes). These contain hemoglobin, an iron-containing protein, which facilitates oxygen transport by reversibly binding to this respiratory gas and greatly increasing its solubility in blood. Blood-related neoplastic diseases include, but are not limited to, acute lymphoblastic leukemia (ALL), acute myeloid leukemia (AML), chronic lymphocytic leukemia (CLL) and chronic myeloid leukemia (CML).

[0153] Blood cell lineages (myeloid lineage and lymphoid lineage): As used herein, unless indicated otherwise or contradictory in context, the term “blood cell lineages” refers to blood cells at any stage of their development from the myeloid or from the lymphoid lineage, and thus include, but are not limited to, hematopoietic stem cells (HSC), myeloid progenitors, lymphoid progenitors, mast cells, myeloblasts, monocytes, macrophages, neutrophils, basophils, eosinophils, erythrocytes, megakaryocytes, thrombocytes, dendritic cells, small lymphocytes, T-lymphocytes (T-cells), B-lymphocytes (B-cells), natural killer (NK)-cells, and any precursor cells thereof.

[0154] Adipose tissue: Adipose tissue is loose connective tissue composed mostly of adipocytes. In addition to adipocytes, adipose tissue contains the stromal vascular fraction (SVF) of cells including preadipocytes, fibroblasts, vascular endothelial cells and a variety of immune cells (i.e. adipose tissue macrophages (ATMs)). Adipose tissue is derived from preadipocytes. Its main role is to store energy in the form of lipids, although it also cushions and insulates the body. Pre-adipocytes are thought to be undifferentiated fibroblasts that can be stimulated to form adipocytes. The pre-adipocytes originate from mesenchymal stem cells. Areolar connective tissue is composed of adipocytes. The term “lipoblast” is used to describe the precursor of the adult cell. The term “lipoblastoma” is used to describe a tumor of this cell type. Adipose tissue-related neoplastic diseases include, but are not limited to, lipoma, Adenolipomas, Angiolipoleiomyomas, Angiolipomas, Corpus callosum lipoma, Cerebellar pontine angle and internal auditory canal lipomas, Chondroid lipomas, Hibernomas, Intradermal spindle cell lipomas, Neural fibrolipomas, Pleomorphic lipomas, Spindle-cell lipomas, Superficial subcutaneous lipomas, Lipoblastoma, Liposarcoma.

[0155] Adipocyte lineage: As used herein, unless indicated otherwise or contradictory in context, the term “adipocyte cell lineage” refers to adipocyte cells at any stage of their development and thus include, but are not limited to, mesenchymal stem cells, areolar connective cells, adipocytes, pre-adipocytes/lipoblasts, and any precursor cells thereof.

[0156] Digestive system: The human digestive system is composed mainly of the gastrointestinal tract (including the esophagus, stomach, small intestine, large intestine, rectum and anus) and the accessory digestive glands (the liver, the gall bladder and the pancreas). To achieve the goal of providing energy and nutrients to the body, six major functions take place in the digestive system: ingestion, secretion, mixing and movement, digestion, absorption, excretion. The gastrointestinal wall refers to the specialized series of tissue layers surrounding the lumen of the gastrointestinal tract. The general structure involves the four following layers (ordered from the lumen outward): mucosa, submucosa, muscularis externa, serosa (if the tissue is intraperitoneal)/adventitia (if the tissue is retroperitoneal). Gastrointestinal cancer refers to malignant conditions of the gastrointestinal tract (GI tract) and accessory organs of digestion. The symptoms relate to the organ affected and can include obstruction (leading to difficulty swallowing or defecating), abnormal bleeding or other associated problems. Gastrointestinal tissue-related neoplastic diseases include, but are not limited to, Esophageal cancer, Stomach cancer, Pancreatic cancer, Liver cancer, Gallbladder cancer, MALT lymphoma, Gastrointestinal stromal tumors and Cancers of the biliary tree, including cholangiocarcinoma.

[0157] Gastrointestinal cell lineages: As used herein, unless indicated otherwise or contradictory in context, the term “gastrointestinal cell lineages” refers to gastrointestinal cells and cells of the digestive accessory organs at any stage of their development and thus include, but are not limited to interstitial cells of Cajal, gastrointestinal epithelial cells, parietal cells, acinar cells, chief cells, mucus cells, goblet cells, G cells, endocrine I cells, endocrine S cells, endocrine K cells, endocrine M cells, ECL (enterochromaffin) cells, D cells, enteroendocrine cells, APUD cells, hepatocytes, sinusoidal hepatic endothelial cells, Kupffer cells, hepatic stellate cells, centroacinar cells, pancreatic stellate cells, α-cells, γ-cells, β-cells, δ-cells, centroacinar cells, basophilic cells, ductal cells, columnar cells, cholecystocytes and any precursor cells thereof.

[0158] Lung: The lung is the essential respiration organ in many air-breathing animals. In mammals the two lungs are located near the backbone on either side of the heart. Their principal function is to transport oxygen from the atmosphere into the bloodstream, and to release carbon dioxide from the bloodstream into the atmosphere. A large surface area is needed for this exchange of gases, which is accomplished by the mosaic of specialized cells that form millions of tiny, exceptionally thin-walled air sacs called alveoli. Lung cells include, but are not limited to, type I pneumocytes, type II pneumocytes, clara cells and goblet cells. Lung tissue-related neoplastic diseases include, but are not limited to, lung cancer also known as carcinoma of the lung or pulmonary carcinoma, Epithelial cells or small-cell lung carcinoma (SCLC) and non-small-cell lung carcinoma (NSCLC).

[0159] Lung cell Lineages: As used herein, unless indicated otherwise or contradictory in context, the term “lung cell Lineage” refers to lung cells at any stage of their development and thus include, but are not limited to, epithelial cells, erythrocytes, alveolar cells and any precursor cells thereof.

[0160] Head and neck cancer: As used herein, unless indicated otherwise or contradictory in context, the term “head and neck cancer” refers to a group of cancers that usually starts in the lip, oral cavity, nasal cavity, paranasal sinuses, pharynx, and larynx. About 90% of head and neck cancers are squamous cell carcinomas. Thus, neoplastic diseases such as head and neck cancers include, but are not limited to, oral cancer, nasopharynx cancer, oropharyngeal cancer, hypopharynx cancer and laryngeal cancer.

[0161] The cell lineage involved in head and neck cancers includes all the cells involved in the formation of such cancers at any stage of their development and thus include, but are not limited to, cells of the oral cavity, cells of the pharynx, cells of the larynx, cells of the paranasal sinuses and nasal cavity, cells of the salivary glands and any precursor cells thereof.

[0162] Ratio: As used herein, unless indicated otherwise or contradictory in context, the term “ratio”, when used in relation to GFR-binding compound with respect to the bioactive carrier in the pharmaceutical association or composition disclosed herein, refers to the (molar, weight or part as specified) ratio between the quantity of GFR-binding compound and the quantity of bioactive carrier. The ratio may be a molar ratio, a weight ratio or a part ratio and will be specified as needed on a case by case basis.

[0163] Quantity units may conventionally be mole, millimole, gram, milligram or parts. For example, in certain embodiments, it is convenient to express the relative quantity between GFR-binding compounds and bioactive carriers using densities. It shall be understood that this ratio may be varied according to the neoplastic cell type to be treated.

[0164] Density: As used herein, unless indicated otherwise or contradictory in context, the term “density”, when used in relation to GFR-binding compound with respect to the bioactive carrier in the pharmaceutical composition disclosed herein, refers to the quantity of GFR-binding compounds, expressed in e.g. mole, millimole, gram, or milligram, with respect to one standardised surface unit e.g. squared millimetre (mm²), squared micrometre (μm²), or squared nanometre (nm²)). For example, in certain embodiments, the ratio between a GFR-binding compound and a bioactive carrier in the pharmaceutical association or composition disclosed herein may be expressed in pmol per mm² or pmol/mm².

[0165] Cell cycle: As used herein, unless indicated otherwise or contradictory in context, the term “cell cycle” refers to the process through which a vertebrate cell self-replicate. In eukaryote cells, cell cycle consists of four discrete phases: G1, S, G2, and M. Together, the G1, S, and G2 phases make up the period known as interphase. During the S or “synthesis” phase, the cell replicates its DNA creating an exact copy of all of its chromosomes. In the M or “mitotic” phase, the cell division actually occurs and separates the chromosomes in its cell nucleus into two identical sets in two nuclei. The first phase within interphase, from the end of the previous M phase until the beginning of DNA synthesis, is called G1. During this phase the biosynthetic activities of the cell, which are considerably slowed down during M phase, resume at a high rate. This phase is marked by the formation of millions of proteins and later on enzymes that are required in S phase, mainly those needed for DNA replication. The G2 phase, or pre-mitotic phase, is the third and final sub-phase of Interphase in the cell cycle directly preceding Mitosis. It follows the successful completion of S phase and ends with the onset of prophase, the first phase of mitosis. In order to move from one phase of the cell cycle to the next, a cell must “validate” numerous checkpoints. At each checkpoint, specialized proteins determine whether the necessary conditions exist. If so, the cell is free to enter into the next phase. If not, progression through the cell cycle is halted. For example, in certain embodiments, during G1, the cell passes through a “validation” window punctuated by the restriction point R. During the “validation” phase, different checkpoints ensure that environmental conditions are favourable for replication. If conditions are not favourable, the cell may enter a resting state known as G0. The G0 phase or resting phase is a period in the cell cycle in which cells exist in a quiescent state. G0 phase is viewed as either an extended G1 phase, where the cell is neither dividing nor preparing to divide, or a distinct quiescent stage that occurs outside of the cell cycle. Typically, a healthy vertebrate cell undergoes cell division when needed e.g. to regenerate damaged tissues or simply replace old tissues by new ones, by switching from a G0 resting state into the G1 state of the cell cycle and resume cell division. In contrast, neoplastic cells (such as cancer cells) have lost their ability to suspend cell division and switch to the G0 phase therefore undergoing permanent cell division which is generally referred to uncontrolled cell division or proliferation. Another “validation” window takes place later in the cell cycle, just before a cell moves from G2 to mitosis. Here, a number of proteins scrutinize the cell's DNA ensuring proper replication has taken place. Finally, another cell cycle “validation” window takes place during mitosis in which different checkpoints determines whether chromosomes are correctly attached to the spindle, and to the network of microtubules that will separate them during cell division.

[0166] Quiescence: As used herein, unless indicated otherwise or contradictory in context, the term “quiescence”, when used in relation to a cell, refers to a resting state during which the cell does not divide, duplicate or proliferate. This state is also called the G0 state. As used herein, “inducing quiescence of a neoplastic cell” thus means to provoke the passage from G1 to G0 of a neoplastic cell which usually has lost the ability to do so. One method to detect the passage from G1 to G0 is, for instance, to monitor the state of phosphorylation of the protein Rb via Western Blot. The Rb protein is normally not phosphorylated during the G0 phase but becomes phosphorylated or even hyper-phosphorylated during the rest of the cell cycle. Consequently, observing the absence (or substantial reduction i.e. at least 90% reduction, in comparison with the quantity present in the G1 phase) of phosphorylated Rb protein on a western blot confirms that a neoplastic cell has undergone (at some point in time) a switch to the G0 phase.

[0167] Cell division or cell proliferation: As used herein, unless indicated otherwise or contradictory in context, the term “cell division” or “cell proliferation”, refers to the process by which a cell self-replicate, replicate or is caused to replicate.

[0168] Proliferate: As used herein, unless indicated otherwise or contradictory in context, the term “proliferate” means to grow, expand or increase or cause to grow, expand or increase. “Proliferative” means having the ability to proliferate. “Anti-proliferative” means having properties to counter, reduce, or inhibit proliferation.

[0169] Hyperproliferation: As used herein, unless indicated otherwise or contradictory in context, the term “hyperproliferation” or “uncontrolled proliferation” means the abnormal growth, expansion or increase or causing the abnormal growth, expansion or increase. Abnormal growth typically originates from the abnormal regulation of the cell cycle preventing the cell to reach the G0 state and stop cell division and replication. One consequence of hyper or uncontrolled proliferation is the development of neoplastic diseases such as tumours and cancers.

[0170] Hyperproliferative diseases: As used herein, unless indicated otherwise or contradictory in context, the term “hyperproliferative diseases” is used interchangeably with “neoplastic diseases” and refers to diseases that are characterized by uncontrolled cellular proliferation and/or disruption in programmed cell death. The loss of a cell's ability to control cellular proliferation is often caused by genetic damage to the cellular pathways responsible for regulating cellular functions, including but not limited to, for example, in certain embodiments, metabolism, cell cycle progression, cell adhesion, vascular function, apoptosis, and angiogenesis.

[0171] Anti-mitogen activity: As used herein, unless indicated otherwise or contradictory in context, the term “anti-mitogen activity”, refers to biological pathways that down-regulate, partially inhibit or suppress cell mitosis i.e. cell division. As used herein, a substance or pharmaceutical association which promotes, induces or favours anti-mitogen activity thus means a substance or pharmaceutical association which provides at least part of its effective biologic or therapeutic action by down-regulating, partially inhibiting or suppressing mitosis of the neoplastic cell to be treated.

[0172] Tumor suppressor pathways: As used herein, unless indicated otherwise or contradictory in context, the term “tumor suppressor pathways” refers to biological pathways that down-regulate, partially inhibit or suppress tumor activity i.e. protect the cell against cell defects which could cause tumors or cancers. As used herein, a substance or pharmaceutical association which promotes, induces or favours tumor suppressor pathways thus means a substance or pharmaceutical association which provides at least part of its effective biologic or therapeutic action by up-regulating, activating or promoting the tumor suppressor genes or proteins of the neoplastic cell to be treated. Known tumor suppressor proteins which have a dampening or repressive effect on the regulation of the cell cycle or promote apoptosis include, but are not limited to, p53, pRb, pVHL, APC, CD95, ST5, YPEL3, ST7, and ST14.

[0173] Anti-oncogenic activity: As used herein, unless indicated otherwise or contradictory in context, the term “anti-oncogenic activity” refers to any molecule having the ability to inhibit, repress or down-regulate the gene or protein expression of oncogenes. An oncogene is a gene that has the potential to cause neoplastic diseases such as cancer. Examples of anti-oncogene molecules include tumor suppressor proteins.

[0174] By “without temporarily or permanently damaging or killing a neoplastic cell”, is meant, unless indicated otherwise or contradictory in context, that a neoplastic disease, such as cancer, is treated without inducing the entry of the neoplastic cells into apoptosis as it may be assessed by the positive expression of proteins caspase 3, 6 and 7.

[0175] By “without permanently inducing a quiescent state in a neoplastic cell”, is meant, unless indicated otherwise or contradictory in context, that a neoplastic disease, such as cancer, is treated by inducing a temporary quiescent state in the neoplastic cells (the cells enter the G0 phase) and then differentiate into a more specialised state.

[0176] Non-mutagenic: As used herein, unless indicated otherwise or contradictory in context, the term “non-mutagenic”, when used in relation to a therapy or treatment, refers to a therapy which does not involve the alteration or modification of a cell's genome.

[0177] Recoding: As used herein, unless indicated otherwise or contradictory in context, the term “recoding” or “converting”, when used in relation to a cell (in particular a neoplastic cell such as a cancer cell), refers to the action of providing, to a neoplastic cell to be treated, a suitable extracellular micro-environment (e.g. in the form of a pharmaceutical association or composition as defined herein) providing appropriate extracellular signals so that the cell may undergo self-recovery or -healing and be converted into a partially or fully differentiated non-neoplastic cell.

[0178] Recoding therapy: As used herein, unless indicated otherwise or contradictory in context, the term “recoding therapy” refers to a therapy that promotes and stimulates the cell's natural abilities to redirect its own fate by integrating accurate micro-environmental recoding signals.

[0179] Extracellular micro-environment: As used herein, unless indicated otherwise or contradictory in context, the term “extracellular micro-environment” refers to the environment surrounding (in functional proximity with) a specific cell which is characterized by biophysical, mechanical and biochemical properties specific for each tissue and is able to regulate cell behavior. Modification of the extracellular micro-environment of a neoplastic cell using, for instance, pharmaceutical associations or compositions as defined herein allows for the conversion or recoding of said neoplastic cell into a healthy, functional, non-neoplastic cell.

[0180] Self-recovery or self-healing: As used herein, unless indicated otherwise or contradictory in context, the term “self-recovery” or “self-healing”, when used in relation to a neoplastic cell such as a cancer cell, means that the neoplastic cell operates its own internal biological changes once it has been recoded or treated using a pharmaceutical association or composition as defined herein, so that it becomes a functional, healthy, non-neoplastic cell. The cell heal itself when in contact with the pharmaceutical composition or association as defined herein and, in contrast with previously reported methods wherein the neoplastic cell is forced to die or maintained in a temporarily reduced or non-proliferative state.

[0181] Physiologically functional cell: As used herein, unless indicated otherwise or contradictory in context, the term “physiologically functional cell” refers to a cell which is able to perform normally all of the cell functions associated with a particular cell type and necessary for the normal physiology of a cell. These functions include all of the intracellular molecular mechanisms but also all of the activities necessary for a normal communication between the cell and its microenvironment. One method which may be used to verify if a cell is physiologically functional is the grafting of the cell, after the introduction of fluorescent markers, in other mammalian model organisms such as mouse models. The cell is grafted in the tissue corresponding to its cell type. The cell characteristics and normal functions are monitored after a period of time with various methods such as in vivo microscopy or histological staining. The term “functional” when used in relation to a molecule, compound or substance refers to a biological molecule in a form in which it exhibits a property and/or activity by which it is characterized.

[0182] Healthy cell: As used herein, unless indicated otherwise or contradictory in context, the term “healthy cell” refers to a cell which presents a normal morphology, normal cell functions and normal cell growth which are not damaged, altered or inactivated by a neoplastic disease.

[0183] Shorter period of time: As used herein, unless indicated otherwise or contradictory in context, the term “shorter period of time”, when used in relation to conversion or recoding duration, means substantially shorter to provide a substantial benefit for the treated patient in comparison with existing treatments. In certain embodiments, a shorter period of time includes at least 1.5-fold, at least 2-fold, at least 2.5-fold, at least 3-fold, at least 3.5-fold, at least 4-fold, at least 4.5-fold, at least 5-fold, at least 6-fold, at least 7-fold, at least 8-fold, at least 9-fold or at least 10-fold reduction with respect to an existing treatment.

[0184] Exogenous: As used herein, unless indicated otherwise or contradictory in context, the term “exogenous” refers to a substance coming from outside a living system such as a cell, an organ, or an individual organism. For example, in certain embodiments, exogenous factors in medicine include pathogens and therapeutics. DNA introduced into a cell via transfection or viral infection may be considered as an exogenous factor. Carcinogens are also commonly referred to as exogenous factors.

[0185] Endogenous: As used herein, unless indicated otherwise or contradictory in context, the term “endogenous” refers to substances that originate from within an organism, tissue, or cell.

[0186] Intracellular: As used herein, unless indicated otherwise or contradictory in context, the term “intracellular” generally means “inside the cell”. In vertebrates, such as animals, the cell membrane is the barrier between the inside of the cell and the outside of the cell (the extracellular milieu). Thus, treatments and therapies in which at least one substance, compound, pharmaceutical association, combination or composition penetrates the cell wall of a cell to be treated in order to produce/deliver its (effective) biological effect are considered as intracellular treatments and therapies.

[0187] Extracellular: As used herein, unless indicated otherwise or contradictory in context, the term “extracellular” means “outside the cell”. In vertebrates, such as animals, the cell membrane is the barrier between the inside of the cell (the intracellular milieu) and the outside of the cell. Thus, treatments and therapies in which no substance, compound, pharmaceutical association, combination or composition requires penetration of the cell membrane in order to produce/deliver its (effective) biological effect (e.g. by interacting with trans-membrane receptors) are considered as extracellular treatments and therapies.

[0188] In other words, a therapy using a plurality of substances in order to provide the desired biological effect wherein one or more of these substances require the entry into the intracellular compartment to provide (or deliver) its biological effect is not considered as an extracellular therapy in the sense of the present disclosure.

[0189] Cytostatic: As used herein, unless indicated otherwise or contradictory in context, the term “cytostatic” refers to inhibiting, reducing, or suppressing the growth, division, or multiplication of a cell (e.g., a mammalian cell (e.g., a human cell)), bacterium, virus, fungus, protozoan, parasite, prion, or a combination thereof.

[0190] Cytotoxic: As used herein, unless indicated otherwise or contradictory in context, the term “cytotoxic” refers to killing or causing injurious, toxic, or deadly effect on a cell (e.g., a mammalian cell (e.g., a human cell)), bacterium, virus, fungus, protozoan, parasite, prion, or a combination thereof.

[0191] In vitro: As used herein, unless indicated otherwise or contradictory in context, the term “in vitro” refers to events that occur in an artificial environment, e.g., in a test tube or reaction vessel, in cell culture, in a Petri dish, etc., rather than within an organism (e.g., animal, plant, or microbe).

[0192] In vivo: As used herein, unless indicated otherwise or contradictory in context, the term “in vivo” refers to events that occur within an organism (e.g., animal, plant, or microbe or cell or tissue thereof).

[0193] Ex vivo: As used herein, unless indicated otherwise or contradictory in context, the term “ex vivo” refers to events that occur in an external environment on tissues sourced from an organism (e.g., animal, plant, or microbe) in an attempt to replicate natural living conditions outside such an organism.

[0194] Syndecans: As used herein, unless indicated otherwise or contradictory in context, the term “syndecans” refers to single transmembrane domain proteins that are thought to act as co-receptors, especially for G protein-coupled receptors. These core proteins carry three to five heparan sulfate and chondroitin sulfate chains, which allow for interaction with a large variety of ligands including fibroblast growth factors, vascular endothelial growth factor, transforming growth factor-beta, fibronectin and antithrombin-1.

[0195] Interactions between fibronectin and some syndecans can be modulated by the extracellular matrix protein tenascin C. The syndecan protein family has four members. Syndecans 1 and 3 and syndecans 2 and 4, making up separate subfamilies, arose by gene duplication and divergent evolution from a single ancestral gene. The syndecan numbers reflect the order in which the cDNAs for each family member were cloned. All syndecans have an N-terminal signal peptide, an ectodomain, a single hydrophobic transmembrane domain, and a short C-terminal cytoplasmic domain. All syndecans are anchored to plasma membrane via a 24-25 amino acid long hydrophobic transmembrane domain. In mammalian cells, syndecans are expressed by unique genes located on different chromosomes. All members of the syndecan family have 5 exons. The difference in size of the syndecans is credited to the variable length of exon 3, which encodes a spacer domain. In humans, the amino acid length of syndecan 1, 2, 3 and 4 is 310, 201, 346 and 198 respectively. Glycosaminoglycan chains, a member of the heparan sulfate group, are an important component of syndecans and are responsible for a diverse set of syndecan functions.

[0196] The addition of glycosaminoglycans to syndecan is controlled by a series of post-translational events. Cyclin-dependent kinases: As used herein, unless indicated otherwise or contradictory in context, the term “Cyclin-dependent kinases” or “CDKs” refers to a family of protein involved in the regulation of the cell cycle. They are present in all known eukaryotes, and their regulatory function in the cell cycle has been evolutionarily conserved. By definition, a CDK binds a regulatory protein called a cyclin. It is reported that, without cyclin, CDK has little kinase activity; only the cyclin-CDK complex is considered to be an active kinase. CDKs phosphorylate their substrates on serines and threonines, so they can be said to belong to the serine-threonine kinase family. CDKs and cyclins are thus highly conserved across species and are present in all cell types including those having a neoplastic phenotype (e.g. cancer cells). Most of the known cyclin-CDK complexes regulate the progression through the cell cycle. Animal cells contain at least nine CDKs, four of which, CDK 1, 2, 3, 4 and 6, are reported to be directly involved in cell cycle regulation: CDK1 regulated by cyclin A, cyclin B; CDK2 regulated by cyclin A, cyclin E; CDK3 regulated by cyclin C; CDK4 regulated by cyclin D1, cyclin D2, cyclin D3; CDK5 regulated by CDK5R1, CDK5R2; CDK6 regulated by cyclin D1, cyclin D2, cyclin D3; CDK7 regulated by cyclin H; CDK8 regulated by cyclin C; CDK9 regulated by cyclin T1, cyclin T2a, cyclin T2b, cyclin K.

[0197] Cyclins: As used herein, unless indicated otherwise or contradictory in context, the term “cyclins” refers to a family of proteins that control the progression of cells through the cell cycle by activating cyclin-dependent kinase (CDK) enzymes. Cyclin D is one of the major cyclins produced in terms of its functional importance. It is known to interact with four CDKs: CDK2, 4, 5, and 6. In proliferating cells, cyclin D-CDK4/6 complex accumulation is of great importance for cell cycle progression. For instance, cyclin D-CDK4/6 complexes partially phosphorylates retinoblastoma tumor suppressor protein (Rb), whose inhibition can induce expression of some genes important for S phase progression.

[0198] Patient/subject: As used herein, unless indicated otherwise or contradictory in context, the term “patient” or “subject”, which are used interchangeably, refers to any organism to which a composition in accordance with the invention may be administered, e.g., for experimental, diagnostic, prophylactic, and/or therapeutic purposes. Typical subjects include animals (e.g., mammals such as mice, rats, rabbits, non-human primates, and humans) and/or plants. As used herein, patients/subjects include those individuals who may seek or be in need of treatment, requires treatment, is receiving treatment, will receive treatment, or a subject who is under care by a trained professional for a particular disease or condition.

[0199] Purified: As used herein, unless indicated otherwise or contradictory in context, the term “purify,” “purified,” “purification” means to make substantially pure or clear from unwanted components, material defilement, admixture or imperfection.

[0200] Targeted Cells: As used herein, unless indicated otherwise or contradictory in context, the term “targeted cells” refers to any one or more cells of interest. The cells may be found in vitro, in vivo, in situ or in the tissue or organ of an organism. The organism may be an animal, preferably a mammal, more preferably a human and most preferably a patient.

[0201] Molecule length: As used herein, unless indicated otherwise or contradictory in context, the term molecule or peptide “length” or “size” means the longest 2D or 3D distance which may possibly be measured within the molecule. For cyclic molecules, “length” or “size” means the longest measurable distance across the cyclic structure. Throughout the present disclosure, when a molecule size or length is given (in general using the nanometre, nm, unit), the following procedures were used to calculate them:
[0202] The so-called «2D», procedure: a 2D chemical structure was drawn in e.g. the ChemDraw® Software. Then, size measurement was carried out via the available ChemDraw length measurement tools. The length value given herein corresponds to the longest 2D length of the molecule using the default settings 2D bond sizes and angles of the software.
[0203] Alternatively, the so-called “3D” procedure may be followed:
[0204] (1) Drawing of the chemical structure of the molecule using suitable softwares (such as ChemDraw).
[0205] (2) Creating a 3D structure model of the molecule hereby drawn using SCWRL (Protein Sci. 2003; 12(9):2001-14) or MODELLER (Current Protocols in Bioinformatics. 15:5.6:5.6.1-5.6.30), each of which is hereby incorporated by reference in its entirety.
[0206] (3) Incubating the obtained 3D structure model in a box simulation containing water for few milliseconds using AMBER (J. Computat. Chem. 2005; 26, 1668-1688), which is hereby incorporated by reference in its entirety.
[0207] (4) Measuring the size of the molecule hereby obtained using softwares such as Pymol® using available Pymol length measurement tools (DeLano Scientific LLC, http://www.pymol.org).

[0208] Root Mean Square Deviation: As used herein, unless indicated otherwise or contradictory in context, the term “Root Mean Square Deviation” or “RMSD” is well known in the art and means the square root of the arithmetic mean of the square of the distances between certain matched atoms. One can represent a molecular conformation as a vector whose components are the Cartesian coordinates of the molecule's atoms. Therefore, a conformation for a molecule with N atoms can be represented as a 3N-dimensional vector of real numbers. To calculate the RMSD of a pair of peptides or peptidomimetics (e.g. x and y), each one of them must be represented as a 3N-length (assuming N atoms) vector of coordinates. The RMSD is therefore the square root of the arithmetic mean of the square of the distances between corresponding atoms of x and y. It is a measure of the average atomic displacement between the conformations of the two structures:

$$\sqrt{\frac{1}{N} {\sum }_{i = 1}^{N} \vert xi - yi \vert {1}^{2}}$$

[0209] In other words, the RMSD is the measure of the average distance between the atoms (usually the backbone atoms) of superimposed polypeptides or peptidomimetics. In the study of globular protein conformations, one customarily measures the similarity in three-dimensional structure by the RMSD of the Ca atomic coordinates after optimal rigid body superposition.

[0210] The RMSD value of a given peptide or peptidomimetic with respect to a specifically selected reference structure (hereinafter may also be referred to as “PEPREF”) may be calculated using various methods all well know by the skilled person. However, for the purpose of the present disclosure and for the avoidance of doubts, the RMSD of a given peptide or peptidomimetic as used in the present disclosure is obtained precisely using the following procedure:

[0211] STEP 1: Creating a 3-dimensional model of (i.e. obtaining 3D structure coordinates for) a peptide or peptidomimetic for which the RMSD is to be calculated, by:

[0212] STEP 1.1: Obtaining a set of polypeptide 3D structure coordinates based on the alignment with the sequence of a peptide or peptidomometic for which the RMSD value is to be calculated, using the BLAST algorithm according to the following procedure:
[0213] 1. Open the following link to access the “Standard Protein Blast” tool: http://blast.ncbi.nlm.nih.gov/Blast.cgi?PROGRAM=blastp&PAGE_TYPE=BlastSearch&LINK_LOC=blasthome
[0214] 2. Enter the amino acid sequence of the peptide or peptidomimetic of interest in the “Enter Query Sequence” section. The alignment is performed one sequence after the other (this is not a multiple alignment tool).
[0215] 3. In the section “Choose Search Set”, choose the following database: Protein Data Bank Proteins (pdb).
[0216] 4. In the section “Choose Search Set”, do not exclude «Models (XM/XP)» and do not Exclude «Uncultured/environmental sample sequences».
[0217] 5. In the section “Program Selection”, choose the following algorithm: blastp (protein-protein BLAST)
[0218] 6. Leave other fields as shown on the screenshot in FIG. 20.
[0219] 7. Run BLAST.
[0220] 8. The results obtained from the query are presented in the form of several pdb files.
[0221] 9. From this output results, the first ten (10) PDB files corresponding to the best sequence alignments are retained. This set of 10 PDB files or structures will be used in the next step (Step 2: structural alignments with STAMP).
[0222] 10. Finally, clean up the 10 structures contained in the 10 PDB files by removing all e.g. additional small molecules, receptors or portions thereof, dimers or portions thereof, so as to retain only the polypeptide chain of interest.

[0223] The set of pdf files contains the polypeptide 3D structure coordinates of the 10 structures having the highest sequence homology with the peptide or peptidomometic for which the RMSD value is to be calculated.

[0224] STEP 1.2: Performing the structural alignment of the set of 3D structure coordinates obtained in STEP 1.1, thereby obtaining a set of aligned polypeptide 3D structure coordinates, by using STAMP (Structural Alignment of Multiple Proteins Version 4.2) according to the following procedure:
[0225] 1. Open the following link to access the “STAMP superposition” tool: http://www.russelllab.org/cgi-bin/pdc/stamp.pl
[0226] 2. In the section entitled “Structure A”, input the PDB file corresponding to the first structure from the set of ten 3D structure coordinates obtained in STEP 1.1, which corresponds to the best sequence alignment with BLAST.
[0227] 3. In the section entitled “Structure B”, input the PDB file corresponding to the second structure from the set of ten 3D structure coordinates obtained in STEP 1.1, which corresponds to the second best sequence alignment with BLAST.
[0228] 4. Run STAMP.
[0229] 5. Repeat steps 2 to 4 with the other eight pdb files from the set of ten 3D structure coordinates identified in STEP 1.1 by successively entering the PDB files in the field “Structure B”.
[0230] 6. As a result, the structural alignment of the 10 structures contained in the set of PDB files obtained in STEP 1.1 is obtained in the form of 9 distinct PDB files each containing a pair of aligned polypeptide 3D structure (structure 1 with structure 2, structure 1 with structure 3, structure 1 with structure 4, . . . , structure 1 with structure 10).
[0231] 7. From these 9 “pair” PDB files, 10 PDB files each containing one of structures 1 to 10 are created.
[0232] 8. 10 PDB files containing the aligned 3D structure coordinates are thus obtained from STEP 1.2. for use in the next step.

[0233] STEP 1.3: Modelling the sequence of peptide or peptidomometic for which the RMSD value is to be calculated against the set of aligned polypeptide 3D structure coordinates obtained in STEP 1.2, thereby obtaining a set of 3D structure coordinates for the peptide or peptidomometic for which the RMSD value is to be calculated, using SCWRL (reference: “SCWRL and MollIDE: computer programs for side-chain conformation prediction and homology modeling”, Nature Protocols VOL. 3 NO. 12 2008, Qiang Wang et al.; which is hereby incorporated by reference in its entirety) according to the following procedure:
[0234] 1. Insert the input sequence of a peptide or peptidomometic for which the RMSD value is to be calculated in Fasta format.
[0235] 2. Import the first PDB file containing the aligned polypeptide 3D structure coordinates obtained in STEP 1.2.
[0236] 3. Run SCWRL by typing the following command for Unix based systems: “scwrl_path/scwrl3 -i inputpdbfile -o outputpdbfile -s sequencefile 4 logfile”.
[0237] 4. As a result, a first PBD file is obtained containing the predicted 3D structure coordinates of the peptide or peptidomometic for which the RMSD value is to be calculated.
[0238] 5. Repeat steps 1 to 3 using the 9 remaining PDB files obtained in STEP 1.2.
[0239] 6. 10 PDB files are obtained from STEP 1.3 for use in the following STEP 1.4.

[0240] STEP 1.4: Minimizing the free energy (ΔG) of the set of 3D structure coordinates for the peptide or peptidomometic for which the RMSD value is to be calculated obtained in STEP 1.3 using GROMACS (Reference: Hess B, Kutzner C, Van Der Spoel D, Lindahl E (2008). “GROMACS 4: Algorithms for Highly Efficient, Load-Balanced, and Scalable Molecular Simulation”. J Chem Theory Comput 4 (2): 435; which is hereby incorporated by reference in its entirety) according to the following procedure:
[0241] 1. Create a Gromacs topology (gmx) file from the first PDB file of the modeled peptide or peptidomometic for which the RMSD value is to be calculated obtained in STEP 1.3, by using the command «pdb2gmx -f NOMDUFICHIERPDB.pdb -water spc». “NOMDUFICHIERPDB” is the name of the input PDB file.
[0242] 2. Create a box around the imported modeled peptide or peptidomometic by using the command «editconf -f conf.gro -bt cubic d 0.7 o box.gro».
[0243] 3. Add solvent (water) molecules into the box by using the command «genbox -cp box.gro -cs spc216.gro -p topol.top -o solvated.gro».
[0244] 4. Prepare the input for the molecular dynamics (MD) run with the command «vim em.mdp». Default run is set to 1000 nsteps.
[0245] 5. Create an input for the MD run by using the command «grompp -f em.mdp -p topol.top -c solvated.gro -o em.tpr».
[0246] 6. Run the command «mdrun -v -deffnm em» to perform the actual energy minimization.
[0247] 7. Run the command «g energy -f em.edr -s em.tpr -o em.xvg», and then run option «7».
[0248] 8. As a result, a first XMG file is obtained. To view the XMG file run the command «xmgrace em.xvg».
[0249] 9. Repeat steps 1 to 8 with the 9 remaining structures obtained in STEP 1.3. 10 XMG files are thus obtained.
[0250] 10. The structure of lowest energy is obtained from each XMG file in the form of a PDB file. 10 PDB files each containing one structure of lowest energy are thus obtained from STEP 1.4 for use in the next step.

[0251] STEP 2: Calculating the RMSD of the peptide or peptidomimetic for which the RMSD value is to be calculated by comparing the 3D structure coordinates of the peptide or peptidomimetic obtained in STEP 1.4 with the 3D structure coordinates of PEPREF to obtain the lowest possible RMSD value using FATCAT (Flexible structure AlignmenT by Chaining Aligned fragment pairs allowing Twists) according to the following procedure:
[0252] 1. Open the following link to access the “FATCAT” software: http://fatcat.burnham.org
[0253] 2. Open the “pairwise alignment” tool.
[0254] 3. Import the PDB file containing the structure coordinates of PEPREF in the “Get the 1st structure” section.
[0255] 4. Import the first PDB file of the peptide or peptidomimetic for which the RMSD value is to be calculated with minimized energy obtained in STEP 1.4.
[0256] 5. Run FATCAT.
[0257] 6. As a result, a first RMSD value of the first structure of the peptide or peptidomimetic for which the RMSD value is to be calculated as obtained in STEP 1.4 will be obtained in the output report.
[0258] 7. Repeat steps 1 to 5 with the 9 remaining structures (PDB files) obtained from STEP 1.4.
[0259] 8. The peptide or peptidomimetic structure with the lowest RMSD (out of the ten RMSD values successively obtained) is the value taken into account in the present application.

[0260] 3D structure coordinates of PEPREF: As used herein, unless indicated otherwise or contradictory in context, the 3D structure coordinates of PEPREF are as follows:

| | | | | | | | | |
|---|---|---|---|---|---|---|---|---|
| ATOM | 511 | N | LYS | A | 1 | −14.570 | 46.437 | 27.424 |
| ATOM | 512 | CA | LYS | A | 1 | −13.512 | 45.748 | 28.151 |
| ATOM | 513 | C | LYS | A | 1 | −13.655 | 44.259 | 27.884 |
| ATOM | 514 | O | LYS | A | 1 | −12.769 | 43.463 | 28.197 |
| ATOM | 515 | CB | LYS | A | 1 | −13.605 | 46.029 | 29.652 |
| ATOM | 516 | CG | LYS | A | 1 | −13.640 | 47.509 | 29.991 |
| ATOM | 517 | CD | LYS | A | 1 | −12.615 | 48.297 | 29.183 |
| ATOM | 518 | CE | LYS | A | 1 | −12.625 | 49.768 | 29.575 |
| ATOM | 519 | NZ | LYS | A | 1 | −13.994 | 50.369 | 29.497 |
| ATOM | 520 | N | ILE | A | 2 | −14.792 | 43.890 | 27.309 |
| ATOM | 521 | CA | ILE | A | 2 | −15.051 | 42.499 | 26.967 |
| ATOM | 522 | C | ILE | A | 2 | −14.911 | 42.370 | 25.444 |
| ATOM | 523 | O | ILE | A | 2 | −15.531 | 43.125 | 24.683 |
| ATOM | 524 | CB | ILE | A | 2 | −16.466 | 42.065 | 27.401 |
| ATOM | 525 | CG1 | ILE | A | 2 | −16.630 | 42.238 | 28.915 |
| ATOM | 526 | CG2 | ILE | A | 2 | −16.710 | 40.629 | 26.985 |
| ATOM | 527 | CD1 | ILE | A | 2 | −15.631 | 41.478 | 29.30 |
| ATOM | 528 | N | PRO | A | 3 | −14.085 | 41.411 | 24.989 |
| ATOM | 529 | CA | PRO | A | 3 | −13.789 | 41.109 | 23.588 |
| ATOM | 530 | C | PRO | A | 3 | −14.998 | 40.695 | 22.768 |
| ATOM | 531 | O | PRO | A | 3 | −15.969 | 40.164 | 23.305 |
| ATOM | 532 | CB | PRO | A | 3 | −12.785 | 39.968 | 23.688 |
| ATOM | 533 | CG | PRO | A | 3 | −12.156 | 40.166 | 25.007 |
| ATOM | 534 | CD | PRO | A | 3 | −13.330 | 40.506 | 25.867 |
| ATOM | 535 | N | LYS | A | 4 | −14.937 | 40.937 | 21.463 |
| ATOM | 536 | CA | LYS | A | 4 | −16.023 | 40.529 | 20.590 |
| ATOM | 537 | C | LYS | A | 4 | −15.886 | 39.015 | 20.391 |
| ATOM | 538 | O | LYS | A | 4 | −14.903 | 38.415 | 20.831 |
| ATOM | 539 | CB | LYS | A | 4 | −15.926 | 41.244 | 19.245 |
| ATOM | 540 | CG | LYS | A | 4 | −15.802 | 42.751 | 19.355 |
| ATOM | 541 | CD | LYS | A | 4 | −16.292 | 43.433 | 18.083 |
| ATOM | 542 | CE | LYS | A | 4 | −16.162 | 44.943 | 18.177 |
| ATOM | 543 | NZ | LYS | A | 4 | −16.825 | 45.628 | 17.019 |
| ATOM | 544 | N | ALA | A | 5 | −16.85 | 38.393 | 19.759 |
| ATOM | 545 | CA | ALA | A | 5 | −16.811 | 36.955 | 19.507 |
| ATOM | 546 | C | ALA | A | 5 | −15.772 | 36.771 | 18.416 |
| ATOM | 547 | O | ALA | A | 5 | −15.727 | 37.534 | 17.455 |
| ATOM | 548 | CB | ALA | A | 5 | −18.168 | 36.419 | 19.043 |
| ATOM | 549 | N | CYS | A | 6 | −14.935 | 35.756 | 18.562 |
| ATOM | 550 | CA | CYS | A | 6 | −13.887 | 35.518 | 17.584 |
| ATOM | 551 | C | CYS | A | 6 | −14.347 | 34.765 | 16.338 |
| ATOM | 552 | O | CYS | A | 6 | −15.327 | 34.018 | 16.368 |
| ATOM | 553 | CB | CYS | A | 6 | −12.743 | 34.768 | 18.241 |
| ATOM | 554 | SG | CYS | A | 6 | −11.198 | 34.959 | 17.353 |
| ATOM | 555 | N | CYS | A | 7 | −13.623 | 34.973 | 15.243 |
| ATOM | 556 | CA | CYS | A | 7 | −13.931 | 34.328 | 13.969 |
| ATOM | 557 | C | CYS | A | 7 | −13.091 | 33.071 | 13.798 |
| ATOM | 558 | O | CYS | A | 7 | −11.961 | 33.123 | 13.302 |
| ATOM | 559 | CB | CYS | A | 7 | −13.653 | 35.290 | 12.824 |
| ATOM | 560 | SG | CYS | A | 7 | −13.930 | 34.633 | 11.154 |
| ATOM | 561 | N | VAL | A | 8 | −13.654 | 31.941 | 14.209 |
| ATOM | 562 | CA | VAL | A | 8 | −12.949 | 30.684 | 14.110 |
| ATOM | 563 | C | VAL | A | 8 | −13.653 | 29.733 | 13.157 |
| ATOM | 564 | O | VAL | A | 8 | −14.759 | 30.016 | 12.687 |
| ATOM | 565 | CB | VAL | A | 8 | −12.814 | 30.038 | 15.492 |
| ATOM | 566 | CG1 | VAL | A | 8 | −11.807 | 30.825 | 16.337 |
| ATOM | 567 | CG2 | VAL | A | 8 | −14.161 | 30.006 | 16.170 |
| ATOM | 568 | N | PRO | A | 9 | −13.003 | 28.601 | 12.828 |
| ATOM | 569 | CA | PRO | A | 9 | −13.593 | 27.615 | 11.918 |
| ATOM | 570 | C | PRO | A | 9 | −14.726 | 26.886 | 12.631 |
| ATOM | 571 | O | PRO | A | 9 | −14.581 | 26.476 | 13.780 |
| ATOM | 572 | CB | PRO | A | 9 | −12.423 | 26.676 | 11.601 |
| ATOM | 573 | CG | PRO | A | 9 | −11.204 | 27.487 | 11.925 |
| ATOM | 574 | CD | PRO | A | 9 | −11.620 | 28.226 | 13.163 |
| ATOM | 575 | N | THR | A | 10 | −15.847 | 26.721 | 11.942 |
| ATOM | 576 | CA | THR | A | 10 | −16.999 | 26.060 | 12.527 |
| ATOM | 577 | C | THR | A | 10 | −17.334 | 24.767 | 11.804 |
| ATOM | 578 | O | THR | A | 10 | −18.097 | 23.943 | 12.303 |
| ATOM | 579 | CB | THR | A | 10 | −18.211 | 27.010 | 12.523 |
| ATOM | 580 | OG1 | THR | A | 10 | −18.491 | 27.445 | 11.185 |
| ATOM | 581 | CG2 | THR | A | 10 | −17.902 | 28.230 | 13.375 |
| ATOM | 582 | N | GLU | A | 11 | −16.750 | 24.586 | 10.627 |
| ATOM | 583 | CA | GLU | A | 11 | −16.980 | 23.377 | 9.848 |
| ATOM | 584 | C | GLU | A | 11 | −15.643 | 22.935 | 9.246 |
| ATOM | 585 | O | GLU | A | 11 | −15.029 | 23.666 | 8.464 |
| ATOM | 586 | CB | GLU | A | 11 | −17.981 | 23.624 | 8.715 |
| ATOM | 587 | CG | GLU | A | 11 | −19.421 | 23.807 | 9.163 |
| ATOM | 588 | CD | GLU | A | 11 | −19.686 | 25.166 | 9.770 |
| ATOM | 589 | OE1 | GLU | A | 11 | −19.478 | 26.175 | 9.073 |
| ATOM | 590 | OE2 | GLU | A | 11 | −20.111 | 25.227 | 10.939 |
| ATOM | 591 | N | LEU | A | 12 | −15.183 | 21.749 | 9.622 |
| ATOM | 592 | CA | LEU | A | 12 | −13.923 | 21.254 | 9.104 |
| ATOM | 593 | C | LEU | A | 12 | −14.062 | 19.912 | 8.386 |
| ATOM | 594 | O | LEU | A | 12 | −15.136 | 19.299 | 8.359 |
| ATOM | 595 | CB | LEU | A | 12 | −12.893 | 21.144 | 10.230 |
| ATOM | 596 | CG | LEU | A | 12 | −12.660 | 22.422 | 11.054 |
| ATOM | 597 | CD1 | LEU | A | 12 | −13.475 | 22.350 | 12.337 |
| ATOM | 598 | CD2 | LEU | A | 12 | −11.181 | 22.586 | 11.399 |
| ATOM | 599 | N | SER | A | 13 | −12.971 | 19.476 | 7.771 |
| ATOM | 600 | CA | SER | A | 13 | −12.964 | 18.218 | 7.046 |
| ATOM | 601 | C | SER | A | 13 | −11.568 | 17.628 | 7.164 |
| ATOM | 602 | O | SER | A | 13 | −10.613 | 18.320 | 7.550 |
| ATOM | 603 | CB | SER | A | 13 | −13.346 | 18.435 | 5.578 |
| ATOM | 604 | OG | SER | A | 13 | −12.404 | 19.261 | 4.923 |
| ATOM | 605 | N | ALA | A | 13 | −11.449 | 16.352 | 6.818 |
| ATOM | 606 | CA | ALA | A | 13 | −10.179 | 15.665 | 6.949 |
| ATOM | 607 | C | ALA | A | 13 | −9.421 | 15.471 | 5.652 |
| ATOM | 608 | O | ALA | A | 13 | −9.941 | 15.720 | 4.563 |
| ATOM | 609 | CB | ALA | A | 13 | −10.413 | 14.306 | 7.626 |
| ATOM | 610 | N | ILE | A | 14 | −8.171 | 15.046 | 5.783 |
| ATOM | 611 | CA | ILE | A | 14 | −7.343 | 14.746 | 4.623 |
| ATOM | 612 | C | ILE | A | 14 | −6.475 | 13.559 | 5.004 |
| ATOM | 613 | O | ILE | A | 14 | −6.212 | 13.316 | 6.183 |
| ATOM | 614 | CB | ILE | A | 14 | −6.401 | 15.916 | 4.183 |
| ATOM | 615 | CG1 | ILE | A | 14 | −5.284 | 16.106 | 5.200 |
| ATOM | 616 | CG2 | ILE | A | 14 | −7.188 | 17.211 | 3.982 |
| ATOM | 617 | CD1 | ILE | A | 14 | −4.173 | 16.973 | 4.696 |
| ATOM | 618 | N | SER | A | 15 | −6.045 | 12.806 | 3.999 |
| ATOM | 619 | CA | SER | A | 15 | −5.187 | 11.662 | 4.242 |
| ATOM | 620 | C | SER | A | 15 | −3.740 | 12.089 | 4.217 |
| ATOM | 621 | O | SER | A | 15 | −3.360 | 13.020 | 3.508 |
| ATOM | 622 | CB | SER | A | 15 | −5.416 | 10.584 | 3.185 |
| ATOM | 623 | OG | SER | A | 15 | −6.667 | 9.971 | 3.401 |
| ATOM | 624 | N | MET | A | 16 | −2.933 | 11.409 | 5.012 |
| ATOM | 625 | CA | MET | A | 16 | −1.518 | 11.700 | 5.047 |
| ATOM | 626 | C | MET | A | 16 | −0.778 | 10.414 | 5.244 |
| ATOM | 627 | O | MET | A | 16 | −1.137 | 9.594 | 6.078 |
| ATOM | 628 | CB | MET | A | 16 | −1.170 | 12.694 | 6.164 |
| ATOM | 629 | CG | MET | A | 16 | −1.848 | 14.042 | 5.974 |
| ATOM | 630 | SD | MET | A | 16 | −1.017 | 15.431 | 6.760 |
| ATOM | 631 | CE | MET | A | 16 | −0.799 | 14.823 | 8.475 |
| ATOM | 632 | N | LEU | A | 17 | 0.238 | 10.231 | 4.426 |
| ATOM | 633 | CA | LEU | A | 17 | 1.077 | 9.065 | 4.508 |
| ATOM | 634 | C | LEU | A | 17 | 2.289 | 9.610 | 5.264 |
| ATOM | 635 | O | LEU | A | 17 | 2.939 | 10.565 | 4.818 |
| ATOM | 636 | CB | LEU | A | 17 | 1.461 | 8.608 | 3.100 |
| ATOM | 637 | CG | LEU | A | 17 | 2.324 | 7.355 | 2.955 |
| ATOM | 638 | CD1 | LEU | A | 17 | 1.553 | 6.145 | 3.445 |
| ATOM | 639 | CD2 | LEU | A | 17 | 2.723 | 7.190 | 1.492 |
| ATOM | 640 | N | TYR | A | 18 | 2.581 | 9.029 | 6.418 |
| ATOM | 641 | CA | TYR | A | 18 | 3.706 | 9.501 | 7.196 |
| ATOM | 642 | C | TYR | A | 18 | 4.434 | 8.333 | 7.835 |
| ATOM | 643 | O | TYR | A | 18 | 4.081 | 7.186 | 7.603 |
| ATOM | 644 | CB | TYR | A | 18 | 3.222 | 10.458 | 8.281 |
| ATOM | 645 | CG | TYR | A | 18 | 2.386 | 9.782 | 9.346 |
| ATOM | 646 | CD1 | TYR | A | 18 | 1.029 | 9.527 | 9.147 |
| ATOM | 647 | CD2 | TYR | A | 18 | 2.961 | 9.379 | 10.550 |
| ATOM | 648 | CE1 | TYR | A | 18 | 0.273 | 8.894 | 10.128 |
| ATOM | 649 | CE2 | TYR | A | 18 | 2.218 | 8.745 | 11.526 |
| ATOM | 650 | CZ | TYR | A | 18 | 0.877 | 8.508 | 11.317 |
| ATOM | 651 | OH | TYR | A | 18 | 0.134 | 7.922 | 12.318 |
| ATOM | 652 | N | LEU | A | 19 | 5.439 | 8.651 | 8.650 |
| ATOM | 653 | CA | LEU | A | 19 | 6.255 | 7.661 | 9.347 |
| ATOM | 654 | C | LEU | A | 19 | 6.210 | 7.946 | 10.847 |
| ATOM | 655 | O | LEU | A | 19 | 6.685 | 8.992 | 11.288 |
| ATOM | 656 | CB | LEU | A | 19 | 7.701 | 7.763 | 8.871 |
| ATOM | 657 | CG | LEU | A | 19 | 7.901 | 7.850 | 7.359 |
| ATOM | 658 | CD1 | LEU | A | 19 | 9.300 | 8.379 | 7.039 |
| ATOM | 659 | CD2 | LEU | A | 19 | 7.669 | 6.482 | 6.748 |

[0261] Structure coordinates: As used herein, unless indicated otherwise or contradictory in context, the “structure coordinates” refers to Cartesian coordinates derived from mathematical equations related to the patterns obtained on diffraction of a monochromatic beam of X-rays by the atoms (scattering centers) of a protein, protein complex or peptide in crystal form. The diffraction data are used to calculate an electron density map of the repeating unit of the crystal. The electron density maps are then used to establish the positions of the individual atoms of the molecule or molecular complex.

[0262] STAMP: STAMP (Structural Alignment of Multiple Proteins) is a tool for aligning protein sequences based on a three-dimensional structure. Its algorithm minimizes the Ca distance between aligned residues of each molecule by applying globally optimal rigid-body rotations and translations. This program provides some information on the equivalence of the residues between the selected models.

[0263] SCWRL: This program predicts and optimizes the protein side-chain conformations. It is using the backbone of a support protein and a backbone-dependent rotamer library. The possible conformations are explored by minimizing the steric hindrance between the side-chains and between the side-chains and the backbone.

[0264] GROMACS: GROMACS is a molecular dynamics package. The “gmx rms” tool included in GROMACS compares two structures by computing the root mean square deviation (RMSD).

[0265] For the avoidance of doubts, the term “pharmaceutical association” or “pharmaceutical combination” as used herein refers to a compound or substance comprising at least two components, i.e. a (modified) GFR-binding compound and a bioactive carrier, linked, connected or bound through at least one covalent or non-covalent link, connection or bond.

[0266] In one aspect, the present disclosure provides for non-mutagenic extracellular therapies having the ability to direct cell fate. It is thus possible to convert or recode a neoplastic cell by modifying its surrounding extracellular micro-environment, in-vitro, ex-vivo or in-vivo, so that the cell operates self-recovery or self-healing and a subject possessing such a neoplastic cell may be protected from a neoplastic disease.

[0267] In one example, a neoplastic cell may operate self-recovery or self-healing e.g. by inducing a quiescence state so that the neoplastic cell may remain inactive or dormant for seconds, minutes, hours, days, weeks, months or years, in particular, will never resume neoplasia; and/or by preventing, reducing or suppressing cell division and/or cell proliferation, preferably uncontrolled cell division and/or cell proliferation of said neoplastic cell; and/or by regulating or promoting anti-mitogen activity and/or tumour suppressor pathways and/or anti-oncogenic activity in said neoplastic cell; and/or by inducing cytostaticity and not cytotoxicity in the neoplastic cell; and/or by inducing differentiation; and/or by regulating and/or modulating the adhesion or interactions between the cell and its micro-environment (i.e. the surrounding ECM) so as activate, reactivate or restore cell adhesion checkpoints in said neoplastic cell.

[0268] In one aspect, the present disclosure provides a pharmaceutical association or combination having the ability to convert or recode, extracellularly, a neoplastic cell, in-vitro, ex-vivo or in-vivo, so that it may be used in the treatment, prevention and/or diagnostic of a neoplastic disease, said association comprising at least one growth factor receptor-binding compound which activates at least one growth factor receptor of a neoplastic cell and at least one bioactive carrier which forms at least one covalent or non-covalent association with said at least one growth factor receptor-binding compound, and wherein said association reduces or suppresses (i) the gene expression of at least one cyclin D in the neoplastic cell and/or (ii) reduces or suppresses the formation of at least one complex formed between said at least one cyclin D and at least one of cyclin dependent-kinase (CDK) 4 or 6 in the neoplastic cell.

### II. Growth Factor Receptor-Binding Compounds

[0269] In one aspect, the present disclosure provides for pharmaceutical associations or combinations comprising at least one growth factor receptor-binding compound as defined herein and a bioactive carrier as defined herein, said associations or combinations having the ability to convert or recode a neoplastic cell into a non-neoplastic cell.

[0270] As used herein, the term “Growth factor receptor-binding compound” or “GFR-binding compound” refers to an exogenous or endogenous compound, molecule or substance (a) having an (binding) affinity for a growth factor receptor as defined herein, (b) comprising the ability to associate or combine with a bioactive carrier as defined herein, and (c) comprising the ability to activate a growth factor receptor as defined herein.

[0271] There are many ways to test, measure and present the binding affinity of a given substance for a given receptor, but for the purpose of the present disclosure, and for the avoidance of any doubts, the (binding) affinity values of a given GFR-binding compound to a given GFR are provided using the method of fluorescence anisotropy. In this method, a GFR-binding compound is fluorescently labelled using techniques well established in the art. Binding of the resulting labelled compound to a growth factor receptor results in a fluctuation of fluorescence anisotropy which is used to construct an affinity binding curve from which the GFR-binding compound binding affinity value is derived. Using this technique, binding affinity values are given in the form of dissociation constants Kd. In certain embodiments, GFR-binding compounds of the present disclosure have Kd values as measured by fluorescence anisotropy of more than 1 (one) picomolar (pM). In certain embodiments, GFR-binding compounds of the present disclosure have Kd values as measured by fluorescence anisotropy of more than 1 (one) nanomolar (nM). In certain embodiments, GFR-binding compounds of the present disclosure have Kd values as measured by fluorescence anisotropy of more than 10 (ten) nanomolar (nM). In certain embodiments, GFR-binding compounds of the present disclosure have Kd values as measured by fluorescence anisotropy of more than 100 (one hundred) nanomolar (nM). In certain embodiments, GFR-binding compounds of the present disclosure have Kd values as measured by fluorescence anisotropy of more than 1 (one) micromolar (M). In certain embodiments, GFR-binding compounds of the present disclosure have Kd values as measured by fluorescence anisotropy of more than 10 (ten) micromolar (M). In certain embodiments, GFR-binding compounds of the present disclosure have Kd values as measured by fluorescence anisotropy of more than 100 (one hundred) micromolar (M).

[0272] There are many ways to test and measure the ability of a given substance to activate a given receptor, but for the purpose of the present disclosure, and for the avoidance of any doubts, a given GFR-binding compound activates a growth factor receptor if it induces growth factor receptor phosphorylation as measured by the western blot method. There are many distinct phosphorylation sites on growth factor receptors and they may widely vary according to the type of growth factor receptor as reported in the published scientific article from Mark A. Lemmon and Joseph Schlessinger, “Cell Signaling by Receptor Tyrosine Kinases”, Cell. 2010; 141(7), 1117-1134, which is hereby incorporated by reference in its entirety.

[0273] A GFR-binding compound is said to possess the ability to associate or combine with a bioactive carrier if it comprises a functional chemical element, function or group allowing for the covalent or non-covalent assembly of the GFR-binding compound and the bioactive carrier. Such a functional chemical element, function or group, also referred to as a bioactive carrier-affinity-containing group or bioactive carrier-high-affinity-containing group, include, but is not limited to, a thiol-containing compound, a cysteine-containing compound, a cysteine, or a GTPGP or a WWFWG peptide fragment.

[0274] Growth factor receptor: As used herein, unless indicated otherwise or contradictory in context, the term “growth factor receptor” or “GFR” is a receptor which binds to growth factors which are naturally occurring substances capable of stimulating, for instance, cellular growth, proliferation, healing, and cellular differentiation. Suitable as growth factor receptors for implementing embodiments of the present invention include epidermal growth factor receptors (EGFR), fibroblast growth factor receptors (FGFR), vascular endothelial growth factor receptors (VEGFR), nerve growth factor receptors (NGFR), Insulin receptor family, Trk receptor family, Eph receptor family, AXL receptor family, LTK receptor family, TIE receptor family, ROR receptor family, DDR receptor family, RET receptor family, KLG receptor family, RYK receptor family, MuSK receptor family, hepatocyte growth factor receptors (HGFR), somatomedin or insulin-like growth factor receptors (SGFR), platelet-derived growth factor receptors (PDGFR), transforming growth factor beta (TGF-3) superfamily proteins such as AMH, ARTN, BMP10, BMP15, BMP2, BMP3, BMP4, BMP5, BMP6, BMP7, BMP8A, BMP8B, GDF1, GDF10, GDF11, GDF15, GDF2, GDF3, GDF3A, GDF5, GDF6, GDF7, GDF8, GDF9, GDNF, INHA, INHBA, INHBB, INHBC, INHBE, LEFTY1, LEFTY2, MSTN, NODAL, NRTN, PSPN, TGFB1, TGFB2 and TGFB3, and any combination thereof.

[0275] Growth factor: As used herein, unless indicated otherwise or contradictory in context, the term “growth factor” refers to any substance(s) having the ability to bind to a growth factor receptor and produce (a) biological effect(s) or reaction(s), such as promoting the growth of tissues, by activating such a growth factor receptor. Exemplary growth factors include, but are not limited to, platelet-derived growth factor (PDGF), platelet-derived angiogenesis factor (PDAF), vascular endotheial growth factor (VEGF), platelet-derived epidermal growth factor (PDEGF), transforming growth factor beta (TGF-β), transforming growth factor A (TGF-A), epidermal growth factor (EGF), fibroblast growth factor (FGF), acidic fibroblast growth factor (FGF-A), basic fibroblast growth factor (FGF-B), insulin-like growth factors 1 and 2 (IGF-I and IGF-2), keratinocyte growth factor (KGF), tumor necrosis factor (TNF), fibroblast growth factor (FGF) and interleukin-1 (IL-I), Keratinocyte Growth Factor-2 (KGF-2), and combinations thereof.

[0276] Activation of growth factor receptors: As used herein, unless indicated otherwise or contradictory in context, the term “activating” or “activation of”, when used in relation to a growth factor receptor, refers to the phosphorylation of the tyrosine kinase domain of such a growth factor receptor.

[0277] In one aspect, the present disclosure provides a GFR-binding compound, as part of a pharmaceutical association, combination or composition as defined herein, as an active principle for use in methods and uses described herein.

[0278] In one particular example, the growth factor receptor involved in the interaction with said GFR-binding compound is an epidermal growth factor receptor. In one particular example, the growth factor receptor involved in the interaction with said GFR-binding compound is a fibroblast growth factor receptor. In one particular example, the growth factor receptor involved in the interaction with said GFR-binding compound is a vascular endothelial growth factor receptor. In one particular example, the growth factor receptor involved in the interaction with said GFR-binding compound is a nerve growth factor receptor. In one particular example, the growth factor receptor involved in the interaction with said GFR-binding compound is a hepatocyte growth factor receptor. In one particular example, the growth factor receptor involved in the interaction with said GFR-binding compound is a somatomedin or insulin-like growth factor receptor. In one particular example, the growth factor receptor involved in the interaction with said GFR-binding compound is a platelet-derived growth factor receptor. In one particular example, the growth factor receptor involved in the interaction with said GFR-binding compound is a protein from the transforming growth factor beta (TGF-β) superfamily.

[0279] In one particular example, the growth factor receptor(s) involved in the interaction with said GFR-binding compound is (are) preferably selected from epidermal growth factor receptors, fibroblast growth factor receptors, vascular endothelial growth factor receptors, nerve growth factor receptors, hepatocyte growth factor receptors, somatomedin or insulin-like growth factor receptors, platelet-derived growth factor receptors, and transforming growth factor beta (TGF-β) superfamily proteins.

[0280] In one particular example, the gene expression of cyclin-D, in a neoplastic cell, is reduced, down-regulated, inhibited or suppressed during phase G1 of the cell cycle. In one particular example, the gene expression of cyclin-D is reduced or suppressed for substantially at least the entire duration of phase G1 of a cell cycle. In one particular example, the gene expression of cyclin-D is reduced by at least 20%. In one particular example, the gene expression of cyclin-D is reduced by at least 30%. In one particular example, the gene expression of cyclin-D is reduced by at least 40%. In one particular example, the gene expression of cyclin-D is reduced by at least 50%. In one particular example, the gene expression of cyclin-D is reduced by at least 60%. In one particular example, the gene expression of cyclin-D is reduced by at least 70%. In one particular example, the gene expression of cyclin-D is reduced by at least 80%. At least 40% is particularly preferred. Reduction of cyclin D gene expression is assessed with respect to the wild-type gene expression of cyclin-D and is measured by Quantitative Real Time Polymerase Chain Reaction (Q-PCR or RT-PCR) by (i) extracting RNA from the treated cells, (ii) converting the extracted RNA into the corresponding cDNA, (iii) subjecting the obtained cDNA to a real-time PCR amplification, (iv) analysing the data obtained from the real-time PCR amplification and comparing them with the data obtained by the ΔΔCt method, and (v) comparing the obtained values to the wild-type value.

[0281] In more details, Quantitative Real Time Polymerase Chain Reaction is carried out by (i) extracting RNA from the treated cells using the RNeasy total RNA kit from Qiagen®, (ii) converting the extracted RNA into the corresponding cDNA using a reverse transcription reaction (Gibco Brl®) and random primers from Invitrogen®, (iii) subjecting the obtained cDNA to a real-time PCR amplification in the presence of SYBR green reagents from Bio-Rad® in a thermocycler (iCycler, Biorad®), (iv) analysing the data obtained from the real-time PCR amplification with the iCycler IQ™ software following the iCycler iQ™ Real-Time PCR Detection System's instruction manual (Catalog Number 170-8740) and using weighted mean as a digital filter, PCR Baseline Subtracted Curve Fit as the analysis mode, FAM/490 as a fluorophore, the automatic calculation of the baseline cycles and the threshold, and the default settings for all other parameters, and comparing them with the data obtained by the ΔΔCt method as reported and described in Livak, K. J. and T. D. Schmittgen. “Analysis of relative gene expression data using real-time quantitative PCR and the 2(-Delta Delta C(T)) Method”, Methods (2001) 25(4): 402-408, hereby incorporated by reference in its entirety, and (v) comparing the obtained values to the wild-type value.

[0282] In one particular example, the gene expression of cyclin-D is maintained at such a reduced level (at least 20%, at least 30%, at least 40%, at least 50%, at least 60%, at least 70%, or at least 80%) during phase G1 of a cell cycle of the treated neoplastic cell. In one example, the gene expression of cyclin-D is maintained at such a reduced level during substantially the entire duration of the G1 phase. In one example, the gene expression of cyclin-D is maintained at such a reduced level during substantially the entire duration of the G1 and S phases. In one example, the gene expression of cyclin-D is maintained at such a reduced level during substantially the entire duration of the G1, S and G2 phases. In one example, the gene expression of cyclin-D is maintained at such a reduced level during substantially the entire duration of the G1, S, G2 and M phases i.e. during substantially the entire duration of a cell cycle of a treated neoplastic cell. Reduction of the gene expression level of cyclin D during substantially the entire duration of G1 is preferred.

[0283] As used herein, unless indicated otherwise or contradictory in context, the term “wild-type expression” of a protein or a gene, refers to the expression of a protein or a gene observed in normal, standard biological conditions i.e., in the present disclosure, without the presence of, or prior to the provision or administration to a neoplastic cell of a pharmaceutical association, combination or composition as defined herein. In-vitro, ex-vivo or in-vivo natural expression level of a protein or a gene in a neoplastic cell may thus be used as a comparative data (or control) to assess and quantify the effect of the presence or administration of a pharmaceutical association, combination or composition as defined herein on the expression level of such a protein or gene in that cell.

[0284] Suitable GFR-binding compounds for implementing certain embodiments of the invention include, without being limited to, linear (i.e. non-cyclic) GFR-binding compounds such as peptides, or variants or analogs thereof, or peptidomimetics, and cyclic GFR-binding compounds such as cyclic peptides, or variants or analogs thereof, or cyclic peptidomimetics.

[0285] Non-Cyclic GFR-Binding Compounds

[0286] In one example, said non-cyclic GFR-binding compound has a molecular weight of less than 4,000 Daltons. In one particular example, said non-cyclic GFR-binding compound has a molecular weight of less than 3,000 Daltons. In one particular example, said non-cyclic GFR-binding compound has a molecular weight comprised between 600 and 4,000 Daltons. In one particular example, said non-cyclic GFR-binding compound has a molecular weight comprised between 800 and 4,000 Daltons. In one particular example, said non-cyclic GFR-binding compound has a molecular weight comprised between 600 and 3,000 Daltons. In one particular example, said non-cyclic GFR-binding compound has a molecular weight comprised between 800 and 3,000 Daltons. Between 800 and 3,000 Daltons is particularly preferred.

[0287] In one particular example, said GFR-binding compound is a (non-cyclic) peptide, or a variant or analog thereof, with (exclusively consisting of, or constituted of) between 8-30 amino acids, in particular between 8-25 amino acids or between 8-22 amino acids, more particularly between 18-22 amino acids, even more particularly between 19-21 or 20 amino acids, having growth factor receptor-binding capability or capabilities.

[0288] In one particular example, said GFR-binding compound is a (non-cyclic) peptidomimetic as defined herein, comprising (consecutively or non-consecutively) between 8-30 amino acids, in particular between 8-25 amino acids or between 8-22 amino acids, more particularly between 18-22 amino acids, even more particularly between 19-21 or 20; wherein said GFR-binding compound has a molecular weight comprised between 600 and 4,000 Daltons (in particular, between 800-4,000 Da, 600-3,000 Da, more particularly between 800-3,000 Da);

[0289] In one particular example, said GFR-binding compound is a peptide, a variant or analog thereof, or a peptidomimetic as defined herein, having growth factor receptor-binding capability or capabilities, having a molecular weight of between 600-4,000 Da, 600-3,000 Da, or 800-4,000 Da, in particular between 800 and 3,000 Da.

[0290] In one particular example, said GFR-binding compound is a peptide, a variant or analog thereof, or a peptidomimetic as defined herein, having growth factor receptor-binding capability or capabilities, with (comprising, or exclusively consisting of, or constituted of) between 8 and 30 (in particular between 8-25 or between 8-22, more particularly between 18-22, even more particularly between 19-21 or 20) amino acids, comprising a peptide with four amino acids (PEP1).

[0291] In one particular example, said GFR-binding compound is a peptide, a variant or analog thereof, or a peptidomimetic as defined herein, with (comprising, or exclusively consisting of, or constituted of) between 8 and 30 (in particular between 8-25 or between 8-22, more particularly between 18-22, even more particularly between 19-21 or 20) amino acids, comprising a peptide with eight amino acids (PEP12).

[0292] In one particular example, said GFR-binding compound is a peptide, a variant or analog thereof, or a peptidomimetic as defined herein, with (comprising, or exclusively consisting of, or constituted of) between 8 and 30 (in particular between 8-25 or between 8-22, more particularly between 18-22, even more particularly between 19-21 or 20) amino acids, comprising a peptide with four amino acids (PEP1); wherein said GFR-binding compound further comprises a peptide with three amino acids (PEP3).

[0293] In one particular example, said GFR-binding compound is a peptide, a variant or analog thereof, or a peptidomimetic as defined herein, with (comprising, or exclusively consisting of, or constituted of) between 8 and 30 (in particular between 8-25 or between 8-22, more particularly between 18-22, even more particularly between 19-21 or 20) amino acids, comprising a peptide with eight amino acids (PEP12); wherein said GFR-binding compound further comprises a peptide with three amino acids (PEP3).

[0294] In one particular example, said GFR-binding compound is a peptide, a variant or analog thereof, or a peptidomimetic as defined herein, with (comprising, or exclusively consisting of, or constituted of) between 8 and 30 (in particular between 8-25 or between 8-22, more particularly between 18-22, even more particularly between 19-21 or 20) amino acids, comprising a peptide with four amino acids (PEP1); wherein said GFR-binding compound further comprises a peptide with five amino acids (PEP5).

[0295] In one particular example, said GFR-binding compound is a peptide, a variant or analog thereof, or a peptidomimetic as defined herein, with (comprising, or exclusively consisting of, or constituted of) between 8 and 30 (in particular between 8-25 or between 8-22, more particularly between 18-22, even more particularly between 19-21 or 20) amino acids, comprising a peptide with eight amino acids (PEP12); wherein said GFR-binding compound further comprises a peptide with five amino acids (PEP5).

[0296] In one particular example, said GFR-binding compound is a peptide, a variant or analog thereof, or a peptidomimetic as defined herein, with (comprising, or exclusively consisting of, or constituted of) between 8 and 30 (in particular between 8-25 or between 8-22, more particularly between 18-22, even more particularly between 19-21 or 20) amino acids, comprising a peptide with four amino acids (PEP1); wherein said GFR-binding compound further comprises a peptide with between six and twelve amino acids (PEP9).

[0297] In one particular example, said GFR-binding compound is a peptide, a variant or analog thereof, or a peptidomimetic as defined herein, with (comprising, or exclusively consisting of, or constituted of) between 8 and 30 (in particular between 8-25 or between 8-22, more particularly between 18-22, even more particularly between 19-21 or 20) amino acids, comprising a peptide with eight amino acids (PEP12); wherein said GFR-binding compound further comprises a peptide with between six and twelve amino acids (PEP9).

[0298] In one particular example, said GFR-binding compound is a peptide, a variant or analog thereof, or a peptidomimetic as defined herein, with (comprising, or exclusively consisting of, or constituted of) between 8 and 30 (in particular between 8-25 or between 8-22, more particularly between 18-22, even more particularly between 19-21 or 20) amino acids, comprising a peptide with four amino acids (PEP1); wherein said GFR-binding compound further comprises a peptide with three amino acids (PEP3), an amino acid or a peptide with between two and seven amino acids (PEP7).

[0299] In one particular example, said GFR-binding compound is a peptide, a variant or analog thereof, or a peptidomimetic as defined herein, with (comprising, or exclusively consisting of, or constituted of) between 8 and 30 (in particular between 8-25 or between 8-22, more particularly between 18-22, even more particularly between 19-21 or 20) amino acids, comprising a peptide with four amino acids (PEP12); wherein said GFR-binding compound further comprises a peptide with three amino acids (PEP3), an amino acid or a peptide with between two and seven amino acids (PEP7).

[0300] In one particular example, said GFR-binding compound is a peptide, a variant or analog thereof, or a peptidomimetic as defined herein, with (comprising, or exclusively consisting of, or constituted of) between 8 and 30 (in particular between 8-25 or between 8-22, more particularly between 18-22, even more particularly between 19-21 or 20) amino acids, comprising a peptide with four amino acids (PEP1); wherein said GFR-binding compound further comprises a peptide with five amino acids (PEP5), an amino acid or a peptide with between two and seven amino acids (PEP7).

[0301] In one particular example, said GFR-binding compound is a peptide, a variant or analog thereof, or a peptidomimetic as defined herein, with (comprising, or exclusively consisting of, or constituted of) between 8 and 30 (in particular between 8-25 or between 8-22, more particularly between 18-22, even more particularly between 19-21 or 20) amino acids, comprising a peptide with four amino acids (PEP12); wherein said GFR-binding compound further comprises a peptide with five amino acids (PEP5), an amino acid or a peptide with between two and seven amino acids (PEP7).

[0302] In one particular example, said GFR-binding compound is a peptide, a variant or analog thereof, or a peptidomimetic as defined herein, with (comprising, or exclusively consisting of, or constituted of) between 8 and 30 (in particular between 8-25 or between 8-22, more particularly between 18-22, even more particularly between 19-21 or 20) amino acids, having the following general formula (I) (hereinafter may also be referred to as compound (I) or peptide (I)):

PEP(C)-PEP12 (I)

[0303] wherein PEP12 is a peptide with 8 amino acids of formula PEP1-AA¹⁷-PEP11 as defined herein; wherein one end of PEP(C) interacts covalently with PEP12 via one end of PEP1; wherein PEP(C) is a peptide with at least 5 amino acids, in particular a peptide with between 5 and 12 amino acids.

[0304] In one aspect, the present disclosure provides a GFR-binding compound of general formula (I), wherein PEP(C) comprises PEP3.

[0305] In one aspect, the present disclosure provides a GFR-binding compound of general formula (I), wherein PEP(C) comprises PEP5. In one particular example, PEP(C) is PEP5.

[0306] In one aspect, the present disclosure provides a GFR-binding compound of general formula (I), wherein PEP(C) comprises PEP9. In one particular example, PEP(C) is PEP9.

[0307] In one aspect, the present disclosure provides a GFR-binding compound of general formula (I), wherein PEP(C) comprises PEP3 and PEP7.

[0308] In one aspect, the present disclosure provides a GFR-binding compound of general formula (I), wherein PEP(C) comprises PEP5 and PEP7.

[0309] In one particular example, said GFR-binding compound is a peptide, a variant or analog thereof, or a peptidomimetic as defined herein, with (comprising, or exclusively consisting of, or constituted of) between 8 and 30 (in particular between 8-25 or between 8-22, more particularly between 18-22, even more particularly between 19-21 or 20) amino acids, having the following general formula (11) (hereinafter may also be referred to as compound (11) or peptide (11)):

PEP7-PEP5-PEP12 (11)

[0310] wherein PEP12 is a peptide with 8 amino acids of formula PEP1-AA¹⁷-PEP11 as defined herein; wherein PEP5 is a peptide with five amino acids as defined herein; wherein PEP7 is an amino acid or a peptide with between two and seven amino acids as defined herein; wherein one end of PEP5 interacts covalently with one end of PEP12 via one end of PEP1; wherein another end of PEP5 interacts covalently with one end of PEP7 via AA⁷.

[0311] In certain embodiments, PEP1 is selected from the group consisting of SAIS, SSLS, NAIS, SATS, SPIS, EPIS, SPIN, KPLS, EPLP, EPLT, SNIT, RSVK and RPVQ.

[0312] In certain embodiments, PEP3 is selected from the group consisting of VPT, VPE, APT, TPT, VPA, APV, VPQ, VSQ, SRV and TQV.

[0313] In certain embodiments, PEP5 is a peptide of general formula PEP3-AA¹¹-AA¹²; wherein PEP3 is selected from the group consisting of VPT, VPE, APT, TPT, VPA, APV, VPQ, VSQ, SRV and TQV; wherein AA¹¹ is selected from the group consisting of E, K, Q, R, A, D, G and H; and wherein AA¹² is selected from the group consisting of L, M, T, E, Q and H. In one particular example, PEP5 is selected from the group consisting of VPTEL, VPEKM, APTKL, APTQL, VPTKL, TPTKM, VPARL, VPTRL, APVKT, VPQAL, VSQDL, VPQDL, VPTEE, VPTGQ, SRVHH and TQVQL.

[0314] In certain embodiments, PEP7 is an amino acid or a peptide with between two and seven amino acids of general formula AA¹-AA²-AA³-AA⁴-AA⁵-AA⁶-AA⁷; wherein wherein AA¹, AA², AA³, AA⁴, and AA⁵ are independently absent or AA^{I} as defined herein; wherein AA⁶ is absent or selected from the group consisting of S, T, C, E, Q, P and R; wherein AA⁷ is absent or is selected from the group consisting of S, T, C, E, Q, P and R, and wherein at least one of AA¹, AA², AA³, AA⁴, AA⁵, AA⁶ or AA⁷ is not absent. In one particular example, PEP7 is selected from the group consisting of KIPKAXX, GIPEPXX, SIPKAXX, HVTKPTX, YVPKPXX, TVPKPXX, AVPKAXX, KVGKAXX, KASKAXX, GSAGPXX, AAPASXX, STPPTXX, HVPKPXX, RVPSTXX, ASAAPXX, ASASPXX, NDEGLEX, SSVKXQP and RNVQXRP, wherein X is C or S throughout the present description.

[0315] In certain embodiments, PEP9 is a peptide of general formula PEP7-PEP5; wherein PEP5 is a peptide of formula PEP3-AA¹¹-AA¹²; wherein PEP3 is selected from the group consisting of VPT, VPE, APT, TPT, VPA, APV, VPQ, VSQ, SRV and TQV; wherein AA¹¹ is selected from the group consisting of E, K, Q, R, A, D, G and H; and wherein AA¹² is selected from the group consisting of L, M, T, E, Q and H; wherein PEP7 is an amino acid or a peptide with between two and seven amino acids of general formula AA¹-AA²-AA³-AA⁴-AA⁵-AA⁶-AA⁷; wherein AA¹, AA², AA³, AA⁴, and AA⁵ are independently absent or AA^{I} as defined herein; wherein AA⁶ is absent or selected from the group consisting of S, T, C, E, Q, P and R; wherein AA⁷ is absent or is selected from the group consisting of S, T, C, E, Q, P and R. In one particular example, PEP9 is selected from the group consisting of KIPKAXXVPTEL, GIPEPXXVPEKM, SIPKAXXVPTEL, HVTKPTXAPTKL, YVPKPXXAPTKL, TVPKPXXAPTQL, AVPKAXXAPTKL, KVGKAXXVPTKL, KASKAXXVPTKL, GSAGPXXTPTKM, AAPASXXVPARL, STPPTXXVPTRL, HVPKPXXAPTKL, RVPSTXXAPVKT, ASAAPXXVPQAL, ASASPXXVSQDL, ASASPXXVPQDL, NDEGLEXVPTEE, NDEGLEXVPTGQ, SSVKXQPSRVHH and RNVQXRPTQVQL, wherein X is C or S throughout the present description.

[0316] In certain embodiments, PEP12 is a peptide of general formula PEP1-AA¹⁷-PEP11; wherein AA¹⁷ is selected from the group consisting of G, A, V, L, I, P, F, M, W, T and S (in particular is selected from the group consisting of M, I, L, V and T); wherein PEP1 is selected from the group consisting of SAIS, SSLS, NAIS, SATS, SPIS, EPIS, SPIN, KPLS, EPLP, EPLT, SNIT, RSVK and RPVQ.

[0317] In particular, in certain embodiments, the pair PEP3:PEP1 is selected from the group consisting of VPT:SAIS, VPE:SAIS, APT:SAIS, TPT:SAIS, VPA:SAIS, APV:SAIS, VPQ:SAIS, VSQ:SAIS, SRV:SAIS, TQV:SAIS, VPE:SSLS, VPT:SSLS, APT:SSLS, TPT:SSLS, VPA:SSLS, APV:SSLS, VPQ:SSLS, VSQ:SSLS, SRV:SSLS, TQV:SSLS, APT:NAIS, VPT:NAIS, VPE:NAIS, TPT:NAIS, VPA:NAIS, APV:NAIS, VPQ:NAIS, VSQ:NAIS, SRV:NAIS, TQV:NAIS, APT:SATS, VPT:SATS, VPE:SATS, TPT:SATS, VPA:SATS, APV:SATS, VPQ:SATS, VSQ:SATS, SRV:SATS, TQV:SATS, VPT:SPIS, VPE:SPIS, APT:SPIS, TPT:SPIS, VPA:SPIS, APV:SPIS, VPQ:SPIS, VSQ:SPIS, SRV:SPIS, TQV:SPIS, VPT:EPIS, VPE:EPIS, APT:EPIS, TPT:EPIS, VPA:EPIS, APV:EPIS, VPQ:EPIS, VSQ:EPIS, SRV:EPIS, TQV:EPIS, TPT:SPIN, VPT:SPIN, VPE:SPIN, APT:SPIN, VPA:SPIN, APV:SPIN, VPQ:SPIN, VSQ:SPIN, SRV:SPIN, TQV:SPIN, APV:KPLS, VPT:KPLS, VPE:KPLS, APT:KPLS, TPT:KPLS, VPA:KPLS, VPQ:KPLS, VSQ:KPLS, SRV:KPLS, TQV:KPLS, VPQ:EPLP, VPT:EPLP, VPE:EPLP, APT:EPLP, TPT:EPLP, VPA:EPLP, APV:EPLP, VSQ:EPLP, SRV:EPLP, TQV:EPLP, VSQ:EPLT, VPT:EPLT, VPE:EPLT, APT:EPLT, TPT:EPLT, VPA:EPLT, APV:EPLT, VPQ:EPLT, SRV:EPLT, TQV:EPLT, VPT:SNIT, VPE:SNIT, APT:SNIT, TPT:SNIT, VPA:SNIT, APV:SNIT, VPQ:SNIT, VSQ:SNIT, SRV:SNIT, TQV:SNIT, SRV:RSVK, VPT:RSVK, VPE:RSVK, APT:RSVK, TPT:RSVK, VPA:RSVK, APV:RSVK, VPQ:RSVK, VSQ:RSVK, TQV:RSVK, TQV:RPVQ, VPT:RPVQ, VPE:RPVQ, APT:RPVQ, TPT:RPVQ, VPA:RPVQ, APV:RPVQ, VPQ:RPVQ, VSQ:RPVQ and SRV:RPVQ.

[0318] In particular, in certain embodiments, the pair PEP5:PEP1 is selected from the group consisting of VPTKM:SAIS, VPTKL:SAIS, VPTQL:SAIS, VPTRL:SAIS, VPTKT:SAIS, VPTAL:SAIS, VPTDL:SAIS, VPEKM:SAIS, APTKL:SAIS, APTQL:SAIS, TPTKM:SAIS, VPARL:SAIS, APVKT:SAIS, VPQAL:SAIS, VSQDL:SAIS, VPQDL:SAIS, SRVHH:SAIS, TQVQL:SAIS, VPEEL:SSLS, VPEKL:SSLS, VPEQL:SSLS, VPEKM:SSLS, VPERL:SSLS, VPEKT:SSLS, VPEAL:SSLS, VPEDL:SSLS, VPTEL:SSLS, APTKL:SSLS, APTQL:SSLS, VPTKL:SSLS, TPTKM:SSLS, VPARL:SSLS, VPTRLSSLS, APVKT:SSLS, VPQAL:SSLS, VSQDL:SSLS, VPQDL:SSLS, VPTEE:SSLS, VPTGQSSLS, SRVHH:SSLS, TQVQL:SSLS, APTEL:NAIS, APTKM:NAIS, APTKL:NAIS, APTRL:NAIS, APTKT:NAIS, APTAL:NAIS, APTDL:NAIS, VPTEL:NAIS, VPEKM:NAIS, VPTKL:NAIS, TPTKM:NAIS, VPARL:NAIS, VPTRL:NAIS, APVKT:NAIS, VPQAL:NAIS, VSQDL:NAIS, VPQDL:NAIS, VPTEE:NAIS, VPTGQ:NAIS, SRVHH:NAIS, TQVQL:NAIS, APTEL:SATS, APTKM:SATS, APTKL:SATS, APTQL:SATS, APTRL:SATS, APTKT:SATS, APTAL:SATS, APTDL:SATS, VPTEL:SATS, VPEKM:SATS, VPTKL:SATS, TPTKM:SATS, VPARL:SATS, VPTRL:SATS, APVKT:SATS, VPQAL:SATS, VSQDL:SATS, VPQDL:SATS, VPTEE:SATS, VPTGQ:SATS, SRVHH:SATS, TQVQL:SATS, VPTEL:SPIS, VPTKM:SPIS, VPTKL:SPIS, VPTQL:SPIS, VPTRL:SPIS, VPTKT:SPIS, VPTAL:SPIS, VPTDL:SPIS, VPEKM:SPIS, APTKL:SPIS, APTQL:SPIS, TPTKM:SPIS, VPARL:SPIS, APVKT:SPIS, VPQAL:SPIS, VSQDL:SPIS, VPQDL:SPIS, SRVHH:SPIS, TQVQL:SPIS, VPTEL:EPIS, VPTKM:EPIS, VPTKL:EPIS, VPTQL:EPIS, VPTRL:EPIS, VPTKT:EPIS, VPTAL:EPIS, VPTDL:EPIS, VPEKM:EPIS, APTKL:EPIS, APTQL:EPIS, TPTKM:EPIS, VPARL:EPIS, APVKT:EPIS, VPQAL:EPIS, VSQDL:EPIS, VPQDL:EPIS, SRVHH:EPIS, TQVQL:EPIS, TPTEL:SPIN, TPTKM:SPIN, TPTKL:SPIN, TPTQL:SPIN, TPTRL:SPIN, TPTKT:SPIN, TPTAL:SPIN, TPTDL:SPIN, VPTEL:SPIN, VPEKM:SPIN, APTKL:SPIN, APTQL:SPIN, VPTKL:SPIN, VPARL:SPIN, VPTRL:SPIN, APVKT:SPIN, VPQAL:SPIN, VSQDL:SPIN, VPQDL:SPIN, VPTEE:SPIN, VPTGQ:SPIN, SRVHH:SPIN, TQVQL:SPIN, VPAEL:SPIS, VPAKM:SPIS, VPAKL:SPIS, VPAQL:SPIS, VPAKT:SPIS, VPAAL:SPIS, VPADL:SPIS, VPTEE:SPIS, VPTGQ:SPIS, APVEL:KPLS, APVKM:KPLS, APVKL:KPLS, APVQL:KPLS, APVRL:KPLS, APVAL:KPLS, APVDL:KPLS, VPTEL:KPLS, VPEKM:KPLS, APTKL:KPLS, APTQL:KPLS, VPTKL:KPLS, TPTKM:KPLS, VPARL:KPLS, VPTRL:KPLS, VPQAL:KPLS, VSQDL:KPLS, VPQDL:KPLS, VPTEE:KPLS, VPTGQ:KPLS, SRVHH:KPLS, TQVQL:KPLS, VPQEL:EPLP, VPQKM:EPLP, VPQKL:EPLP, VPQQL:EPLP, VPQRL:EPLP, VPQKT:EPLP, VPQDL:EPLP, VPTEL:EPLP, VPEKM:EPLP, APTKL:EPLP, APTQL:EPLP, VPTKL:EPLP, TPTKM:EPLP, VPARL:EPLP, VPTRL:EPLP, APVKT:EPLP, VSQDL:EPLP, VPTEE:EPLP, VPTGQ:EPLP, SRVHH:EPLP, TQVQL:EPLP, VSQEL:EPLT, VSQKM:EPLT, VSQKL:EPLT, VSQQL:EPLT, VSQRL:EPLT, VSQKT:EPLT, VSQAL:EPLT, VSQDL:EPLT, VPTEL:EPLT, VPEKM:EPLT, APTKL:EPLT, APTQL:EPLT, VPTKL:EPLT, TPTKM:EPLT, VPARL:EPLT, VPTRL:EPLT, APVKT:EPLT, VPQAL:EPLT, VPTEE:EPLT, VPTGQ:EPLT, SRVHH:EPLT, TQVQL:EPLT, VPQEL:EPLT, VPQKM:EPLT, VPQKL:EPLT, VPQQL:EPLT, VPQRL:EPLT, VPQKT:EPLT, VPQDL:EPLT, VPTGQ:SNIT, VPEKM:SNIT, APTKL:SNIT, APTQL:SNIT, TPTKM:SNIT, VPARL:SNIT, APVKT:SNIT, VPQAL:SNIT, VSQDL:SNIT, VPQDL:SNIT, SRVHH:SNIT, TQVQL:SNIT, SRVQL:RSVK, VPTEL:RSVK, VPEKM:RSVK, APTKL:RSVK, APTQL:RSVK, VPTKL:RSVK, TPTKM:RSVK, VPARL:RSVK, VPTRL:RSVK, APVKT:RSVK, VPQAL:RSVK, VSQDL:RSVK, VPQDL:RSVK, VPTEE:RSVK, VPTGQ:RSVK, TQVQL:RSVK, TQVHH:RPVQ, VPTEL:RPVQ, VPEKM:RPVQ, APTKL:RPVQ, APTQL:RPVQ, VPTKL:RPVQ, TPTKM:RPVQ, VPARL:RPVQ, VPTRL:RPVQ, APVKT:RPVQ, VPQAL:RPVQ, VSQDL:RPVQ, VPQDL:RPVQ, VPTEE:RPVQ, VPTGQ:RPVQ and SRVHH:RPVQ.

[0319] In particular, in certain embodiments, the pair PEP7:PEP1 is selected from the group consisting of GIPEPXX:SAIS, HVTKPTX:SAIS, YVPKPXX:SAIS, TVPKPXX:SAIS, AVPKAXX:SAIS, KVGKAXX:SAIS, KASKAXX:SAIS, GSAGPXX:SAIS, AAPASXX:SAIS, STPPTXX:SAIS, HVPKPXX:SAIS, RVPSTXX:SAIS, ASAAPXX:SAIS, ASASPXX:SAIS, SSVKXQP:SAIS, RNVQXRP:SAIS, KIPKAXX:SSLS, SIPKAXX:SSLS, HVTKPTX:SSLS, YVPKPXX:SSLS, TVPKPXX:SSLS, AVPKAXX:SSLS, KVGKAXX:SSLS, KASKAXX:SSLS, GSAGPXX:SSLS, AAPASXX:SSLS, STPPTXX:SSLS, HVPKPXX:SSLS, RVPSTXX:SSLS, ASAAPXX:SSLS, ASASPXX:SSLS, NDEGLEX:SSLS, SSVKXQP:SSLS, RNVQXRP:SSLS, KIPKAXX:NAIS, GIPEPXX:NAIS, SIPKAXX:NAIS, AVPKAXX:NAIS, KVGKAXX:NAIS, KASKAXX:NAIS, GSAGPXX:NAIS, AAPASXX:NAIS, STPPTXX:NAIS, RVPSTXX:NAIS, ASAAPXX:NAIS, ASASPXX:NAIS, NDEGLEX:NAIS, SSVKXQP:NAIS, RNVQXRP:NAIS, KIPKAXX:SATS, GIPEPXX:SATS, SIPKAXX:SATS, HVTKPTX:SATS, YVPKPXX:SATS, TVPKPXX:SATS, KVGKAXX:SATS, KASKAXX:SATS, GSAGPXX:SATS, AAPASXX:SATS, STPPTXX:SATS, HVPKPXX:SATS, RVPSTXX:SATS, ASAAPXX:SATS, ASASPXX:SATS, NDEGLEX:SATS, SSVKXQP:SATS, RNVQXRP:SATS, KIPKAXX:SPIS, GIPEPXX:SPIS, SIPKAXX:SPIS, HVTKPTX:SPIS, YVPKPXX:SPIS, TVPKPXX:SPIS, AVPKAXX:SPIS, KASKAXX:SPIS, GSAGPXX:SPIS, AAPASXX:SPIS, STPPTXX:SPIS, HVPKPXX:SPIS, RVPSTXX:SPIS, ASAAPXX:SPIS, ASASPXX:SPIS, SSVKXQP:SPIS, RNVQXRP:SPIS, KIPKAXX:EPIS, GIPEPXX:EPIS, SIPKAXX:EPIS, HVTKPTX:EPIS, YVPKPXX:EPIS, TVPKPXX:EPIS, AVPKAXX:EPIS, KVGKAXX:EPIS, GSAGPXX:EPIS, AAPASXX:EPIS, STPPTXX:EPIS, HVPKPXX:EPIS, RVPSTXX:EPIS, ASAAPXX:EPIS, ASASPXX:EPIS, SSVKXQP:EPIS, RNVQXRP:EPIS, KIPKAXX:SPIN, GIPEPXX:SPIN, SIPKAXX:SPIN, HVTKPTX:SPIN, YVPKPXX:SPIN, TVPKPXX:SPIN, AVPKAXX:SPIN, KVGKAXX:SPIN, KASKAXX:SPIN, AAPASXX:SPIN, STPPTXX:SPIN, HVPKPXX:SPIN, RVPSTXX:SPIN, ASAAPXX:SPIN, ASASPXX:SPIN, NDEGLEX:SPIN, SSVKXQP:SPIN, RNVQXRP:SPIN, KVGKAXX:SPIS, NDEGLEX:SPIS, KIPKAXX:KPLS, GIPEPXX:KPLS, SIPKAXX:KPLS, HVTKPTX:KPLS, YVPKPXX:KPLS, TVPKPXX:KPLS, AVPKAXX:KPLS, KVGKAXX:KPLS, KASKAXX:KPLS, GSAGPXX:KPLS, AAPASXX:KPLS, STPPTXX:KPLS, HVPKPXX:KPLS, ASAAPXX:KPLS, ASASPXX:KPLS, NDEGLEX:KPLS, SSVKXQP:KPLS, RNVQXRP:KPLS, KIPKAXX:EPLP, GIPEPXX:EPLP, SIPKAXX:EPLP, HVTKPTX:EPLP, YVPKPXX:EPLP, TVPKPXX:EPLP, AVPKAXX:EPLP, KVGKAXX:EPLP, KASKAXX:EPLP, GSAGPXX:EPLP, AAPASXX:EPLP, STPPTXX:EPLP, HVPKPXX:EPLP, RVPSTXX:EPLP, ASASPXX:EPLP, NDEGLEX:EPLP, SSVKXQP:EPLP, RNVQXRP:EPLP, KIPKAXX:EPLT, GIPEPXX:EPLT, SIPKAXX:EPLT, HVTKPTX:EPLT, YVPKPXX:EPLT, TVPKPXX:EPLT, AVPKAXX:EPLT, KVGKAXX:EPLT, KASKAXX:EPLT, GSAGPXX:EPLT, AAPASXX:EPLT, STPPTXX:EPLT, HVPKPXX:EPLT, RVPSTXX:EPLT, ASAAPXX:EPLT, ASASPXX:EPLT, NDEGLEX:EPLT, SSVKXQP:EPLT, RNVQXRP:EPLT, NDEGLEX:SNIT, GIPEPXX:SNIT, HVTKPTX:SNIT, YVPKPXX:SNIT, TVPKPXX:SNIT, AVPKAXX:SNIT, GSAGPXX:SNIT, AAPASXX:SNIT, HVPKPXX:SNIT, RVPSTXX:SNIT, ASAAPXX:SNIT, ASASPXX:SNIT, SSVKXQP:SNIT, RNVQXRP:SNIT, RNVQXRP:RSVK, KIPKAXX:RSVK, GIPEPXX:RSVK, SIPKAXX:RSVK, HVTKPTX:RSVK, YVPKPXX:RSVK, TVPKPXX:RSVK, AVPKAXX:RSVK, KVGKAXX:RSVK, KASKAXX:RSVK, GSAGPXX:RSVK, AAPASXX:RSVK, STPPTXX:RSVK, HVPKPXX:RSVK, RVPSTXX:RSVK, ASAAPXX:RSVK, ASASPXX:RSVK, NDEGLEX:RSVK, SSVKXQP:RPVQ, KIPKAXX:RPVQ, GIPEPXX:RPVQ, SIPKAXX:RPVQ, HVTKPTX:RPVQ, YVPKPXX:RPVQ, TVPKPXX:RPVQ, AVPKAXX:RPVQ, KVGKAXX:RPVQ, KASKAXX:RPVQ, GSAGPXX:RPVQ, AAPASXX:RPVQ, STPPTXX:RPVQ, HVPKPXX:RPVQ, RVPSTXX:RPVQ, ASAAPXX:RPVQ, ASASPXX:RPVQ and NDEGLEX:RPVQ.

[0320] In particular, in certain embodiments, the pair PEP9:PEP1 is selected from the group consisting of GIPEPXXVPTKM:SAIS, HVTKPTXVPTKL:SAIS, YVPKPXXVPTKL:SAIS, TVPKPXXVPTQL:SAIS, AVPKAXXVPTKL:SAIS, KVGKAXXVPTKL:SAIS, KASKAXXVPTKL:SAIS, GSAGPXXVPTKM:SAIS, AAPASXXVPTRL:SAIS, STPPTXXVPTRL:SAIS, HVPKPXXVPTKL:SAIS, RVPSTXXVPTKT:SAIS, ASAAPXXVPTAL:SAIS, ASASPXXVPTDL:SAIS, GIPEPXXVPEKM:SAIS, HVTKPTXAPTKL:SAIS, YVPKPXXAPTKL:SAIS, TVPKPXXAPTQL:SAIS, AVPKAXXAPTKL:SAIS, GSAGPXXTPTKM:SAIS, AAPASXXVPARL:SAIS, HVPKPXXAPTKL:SAIS, RVPSTXXAPVKT:SAIS, ASAAPXXVPQAL:SAIS, ASASPXXVSQDL:SAIS, ASASPXXVPQDL:SAIS, SSVKXQPSRVHH:SAIS, RNVQXRPTQVQL:SAIS, KIPKAXXVPEEL:SSLS, SIPKAXXVPEEL:SSLS, HVTKPTXVPEKL:SSLS, YVPKPXXVPEKL:SSLS, TVPKPXXVPEQL:SSLS, AVPKAXXVPEKL:SSLS, KVGKAXXVPEKL:SSLS, KASKAXXVPEKL:SSLS, GSAGPXXVPEKM:SSLS, AAPASXXVPERL:SSLS, STPPTXXVPERL:SSLS, HVPKPXXVPEKL:SSLS, RVPSTXXVPEKT:SSLS, ASAAPXXVPEAL:SSLS, ASASPXXVPEDL:SSLS, KIPKAXXVPTEL:SSLS, SIPKAXXVPTEL:SSLS, HVTKPTXAPTKL:SSLS, YVPKPXXAPTKL:SSLS, TVPKPXXAPTQL:SSLS, AVPKAXXAPTKL:SSLS, KVGKAXXVPTKL:SSLS, KASKAXXVPTKL:SSLS, GSAGPXXTPTKM:SSLS, AAPASXXVPARL:SSLS, STPPTXXVPTRL:SSLS, HVPKPXXAPTKL:SSLS, RVPSTXXAPVKT:SSLS, ASAAPXXVPQAL:SSLS, ASASPXXVSQDL:SSLS, ASASPXXVPQDL:SSLS, NDEGLEXVPTEE:SSLS, NDEGLEXVPTGQ:SSLS, SSVKXQPSRVHH:SSLS, RNVQXRPTQVQL:SSLS, KIPKAXXAPTEL:NAIS, GIPEPXXAPTKM:NAIS, SIPKAXXAPTEL:NAIS, AVPKAXXAPTKL:NAIS, KVGKAXXAPTKL:NAIS, KASKAXXAPTKL:NAIS, GSAGPXXAPTKM:NAIS, AAPASXXAPTRL:NAIS, STPPTXXAPTRL:NAIS, RVPSTXXAPTKT:NAIS, ASAAPXXAPTAL:NAIS, ASASPXXAPTDL:NAIS, KIPKAXXVPTEL:NAIS, GIPEPXXVPEKM:NAIS, SIPKAXXVPTEL:NAIS, KVGKAXXVPTKL:NAIS, KASKAXXVPTKL:NAIS, GSAGPXXTPTKM:NAIS, AAPASXXVPARL:NAIS, STPPTXXVPTRL:NAIS, RVPSTXXAPVKT:NAIS, ASAAPXXVPQAL:NAIS, ASASPXXVSQDL:NAIS, ASASPXXVPQDL:NAIS, NDEGLEXVPTEE:NAIS, NDEGLEXVPTGQ:NAIS, SSVKXQPSRVHH:NAIS, RNVQXRPTQVQL:NAIS, KIPKAXXAPTEL:SATS, GIPEPXXAPTKM:SATS, SIPKAXXAPTEL:SATS, HVTKPTXAPTKL:SATS, YVPKPXXAPTKL:SATS, TVPKPXXAPTQL:SATS, KVGKAXXAPTKL:SATS, KASKAXXAPTKL:SATS, GSAGPXXAPTKM:SATS, AAPASXXAPTRL:SATS, STPPTXXAPTRL:SATS, HVPKPXXAPTKL:SATS, RVPSTXXAPTKT:SATS, ASAAPXXAPTAL:SATS, ASASPXXAPTDL:SATS, KIPKAXXVPTEL:SATS, GIPEPXXVPEKM:SATS, SIPKAXXVPTEL:SATS, KVGKAXXVPTKL:SATS, KASKAXXVPTKL:SATS, GSAGPXXTPTKM:SATS, AAPASXXVPARL:SATS, STPPTXXVPTRL:SATS, RVPSTXXAPVKT:SATS, ASAAPXXVPQAL:SATS, ASASPXXVSQDL:SATS, ASASPXXVPQDL:SATS, NDEGLEXVPTEE:SATS, NDEGLEXVPTGQ:SATS, SSVKXQPSRVHH:SATS, RNVQXRPTQVQL:SATS, KIPKAXXVPTEL:SPIS, GIPEPXXVPTKM:SPIS, SIPKAXXVPTEL:SPIS, HVTKPTXVPTKL:SPIS, YVPKPXXVPTKL:SPIS, TVPKPXXVPTQL:SPIS, AVPKAXXVPTKL:SPIS, KASKAXXVPTKL:SPIS, GSAGPXXVPTKM:SPIS, AAPASXXVPTRL:SPIS, STPPTXXVPTRL:SPIS, HVPKPXXVPTKL:SPIS, RVPSTXXVPTKT:SPIS, ASAAPXXVPTAL:SPIS, ASASPXXVPTDL:SPIS, GIPEPXXVPEKM:SPIS, HVTKPTXAPTKL:SPIS, YVPKPXXAPTKL:SPIS, TVPKPXXAPTQL:SPIS, AVPKAXXAPTKL:SPIS, GSAGPXXTPTKM:SPIS, AAPASXXVPARL:SPIS, HVPKPXXAPTKL:SPIS, RVPSTXXAPVKT:SPIS, ASAAPXXVPQAL:SPIS, ASASPXXVSQDL:SPIS, ASASPXXVPQDL:SPIS, SSVKXQPSRVHH:SPIS, RNVQXRPTQVQL:SPIS, KIPKAXXVPTEL:EPIS, GIPEPXXVPTKM:EPIS, SIPKAXXVPTEL:EPIS, HVTKPTXVPTKL:EPIS, YVPKPXXVPTKL:EPIS, TVPKPXXVPTQL:EPIS, AVPKAXXVPTKL:EPIS, KVGKAXXVPTKL:EPIS, GSAGPXXVPTKM:EPIS, AAPASXXVPTRL:EPIS, STPPTXXVPTRL:EPIS, HVPKPXXVPTKL:EPIS, RVPSTXXVPTKT:EPIS, ASAAPXXVPTAL:EPIS, ASASPXXVPTDL:EPIS, GIPEPXXVPEKM:EPIS, HVTKPTXAPTKL:EPIS, YVPKPXXAPTKL:EPIS, TVPKPXXAPTQL:EPIS, AVPKAXXAPTKL:EPIS, GSAGPXXTPTKM:EPIS, AAPASXXVPARL:EPIS, HVPKPXXAPTKL:EPIS, RVPSTXXAPVKT:EPIS, ASAAPXXVPQAL:EPIS, ASASPXXVSQDL:EPIS, ASASPXXVPQDL:EPIS, SSVKXQPSRVHH:EPIS, RNVQXRPTQVQL:EPIS, KIPKAXXTPTEL:SPIN, GIPEPXXTPTKM:SPIN, SIPKAXXTPTEL:SPIN, HVTKPTXTPTKL:SPIN, YVPKPXXTPTKL:SPIN, TVPKPXXTPTQL:SPIN, AVPKAXXTPTKL:SPIN, KVGKAXXTPTKL:SPIN, KASKAXXTPTKL:SPIN, AAPASXXTPTRL:SPIN, STPPTXXTPTRL:SPIN, HVPKPXXTPTKL:SPIN, RVPSTXXTPTKT:SPIN, ASAAPXXTPTAL:SPIN, ASASPXXTPTDL:SPIN, KIPKAXXVPTEL:SPIN, GIPEPXXVPEKM:SPIN, SIPKAXXVPTEL:SPIN, HVTKPTXAPTKL:SPIN, YVPKPXXAPTKL:SPIN, TVPKPXXAPTQL:SPIN, AVPKAXXAPTKL:SPIN, KVGKAXXVPTKL:SPIN, KASKAXXVPTKL:SPIN, AAPASXXVPARL:SPIN, STPPTXXVPTRL:SPIN, HVPKPXXAPTKL:SPIN, RVPSTXXAPVKT:SPIN, ASAAPXXVPQAL:SPIN, ASASPXXVSQDL:SPIN, ASASPXXVPQDL:SPIN, NDEGLEXVPTEE:SPIN, NDEGLEXVPTGQ:SPIN, SSVKXQPSRVHH:SPIN, RNVQXRPTQVQL:SPIN, KIPKAXXVPAEL:SPIS, GIPEPXXVPAKM:SPIS, SIPKAXXVPAEL:SPIS, HVTKPTXVPAKL:SPIS, YVPKPXXVPAKL:SPIS, TVPKPXXVPAQL:SPIS, AVPKAXXVPAKL:SPIS, KVGKAXXVPAKL:SPIS, KASKAXXVPAKL:SPIS, GSAGPXXVPAKM:SPIS, STPPTXXVPARL:SPIS, HVPKPXXVPAKL:SPIS, RVPSTXXVPAKT:SPIS, ASAAPXXVPAAL:SPIS, ASASPXXVPADL:SPIS, KVGKAXXVPTKL:SPIS, NDEGLEXVPTEE:SPIS, NDEGLEXVPTGQ:SPIS, KIPKAXXAPVEL:KPLS, GIPEPXXAPVKM:KPLS, SIPKAXXAPVEL:KPLS, HVTKPTXAPVKL:KPLS, YVPKPXXAPVKL:KPLS, TVPKPXXAPVQL:KPLS, AVPKAXXAPVKL:KPLS, KVGKAXXAPVKL:KPLS, KASKAXXAPVKL:KPLS, GSAGPXXAPVKM:KPLS, AAPASXXAPVRL:KPLS, STPPTXXAPVRL:KPLS, HVPKPXXAPVKL:KPLS, ASAAPXXAPVAL:KPLS, ASASPXXAPVDL:KPLS, KIPKAXXVPTEL:KPLS, GIPEPXXVPEKM:KPLS, SIPKAXXVPTEL:KPLS, HVTKPTXAPTKL:KPLS, YVPKPXXAPTKL:KPLS, TVPKPXXAPTQL:KPLS, AVPKAXXAPTKL:KPLS, KVGKAXXVPTKL:KPLS, KASKAXXVPTKL:KPLS, GSAGPXXTPTKM:KPLS, AAPASXXVPARL:KPLS, STPPTXXVPTRL:KPLS, HVPKPXXAPTKL:KPLS, ASAAPXXVPQAL:KPLS, ASASPXXVSQDL:KPLS, ASASPXXVPQDL:KPLS, NDEGLEXVPTEE:KPLS, NDEGLEXVPTGQ:KPLS, SSVKXQPSRVHH:KPLS, RNVQXRPTQVQL:KPLS, KIPKAXXVPQEL:EPLP, GIPEPXXVPQKM:EPLP, SIPKAXXVPQEL:EPLP, HVTKPTXVPQKL:EPLP, YVPKPXXVPQKL:EPLP, TVPKPXXVPQQL:EPLP, AVPKAXXVPQKL:EPLP, KVGKAXXVPQKL:EPLP, KASKAXXVPQKL:EPLP, GSAGPXXVPQKM:EPLP, AAPASXXVPQRL:EPLP, STPPTXXVPQRL:EPLP, HVPKPXXVPQKL:EPLP, RVPSTXXVPQKT:EPLP, ASASPXXVPQDL:EPLP, KIPKAXXVPTEL:EPLP, GIPEPXXVPEKM:EPLP, SIPKAXXVPTEL:EPLP, HVTKPTXAPTKL:EPLP, YVPKPXXAPTKL:EPLP, TVPKPXXAPTQL:EPLP, AVPKAXXAPTKL:EPLP, KVGKAXXVPTKL:EPLP, KASKAXXVPTKL:EPLP, GSAGPXXTPTKM:EPLP, AAPASXXVPARL:EPLP, STPPTXXVPTRL:EPLP, HVPKPXXAPTKL:EPLP, RVPSTXXAPVKT:EPLP, ASASPXXVSQDL:EPLP, NDEGLEXVPTEE:EPLP, NDEGLEXVPTGQ:EPLP, SSVKXQPSRVHH:EPLP, RNVQXRPTQVQL:EPLP, KIPKAXXVSQEL:EPLT, GIPEPXXVSQKM:EPLT, SIPKAXXVSQEL:EPLT, HVTKPTXVSQKL:EPLT, YVPKPXXVSQKL:EPLT, TVPKPXXVSQQL:EPLT, AVPKAXXVSQKL:EPLT, KVGKAXXVSQKL:EPLT, KASKAXXVSQKL:EPLT, GSAGPXXVSQKM:EPLT, AAPASXXVSQRL:EPLT, STPPTXXVSQRL:EPLT, HVPKPXXVSQKL:EPLT, RVPSTXXVSQKT:EPLT, ASAAPXXVSQAL:EPLT, ASASPXXVSQDL:EPLT, KIPKAXXVPTEL:EPLT, GIPEPXXVPEKM:EPLT, SIPKAXXVPTEL:EPLT, HVTKPTXAPTKL:EPLT, YVPKPXXAPTKL:EPLT, TVPKPXXAPTQL:EPLT, AVPKAXXAPTKL:EPLT, KVGKAXXVPTKL:EPLT, KASKAXXVPTKL:EPLT, GSAGPXXTPTKM:EPLT, AAPASXXVPARL:EPLT, STPPTXXVPTRL:EPLT, HVPKPXXAPTKL:EPLT, RVPSTXXAPVKT:EPLT, ASAAPXXVPQAL:EPLT, NDEGLEXVPTEE:EPLT, NDEGLEXVPTGQ:EPLT, SSVKXQPSRVHH:EPLT, RNVQXRPTQVQL:EPLT, KIPKAXXVPQEL:EPLT, GIPEPXXVPQKM:EPLT, SIPKAXXVPQEL:EPLT, HVTKPTXVPQKL:EPLT, YVPKPXXVPQKL:EPLT, TVPKPXXVPQQL:EPLT, AVPKAXXVPQKL:EPLT, KVGKAXXVPQKL:EPLT, KASKAXXVPQKL:EPLT, GSAGPXXVPQKM:EPLT, AAPASXXVPQRL:EPLT, STPPTXXVPQRL:EPLT, HVPKPXXVPQKL:EPLT, RVPSTXXVPQKT:EPLT, ASASPXXVPQDL:EPLT, NDEGLEXVPTGQ:SNIT, GIPEPXXVPEKM:SNIT, HVTKPTXAPTKL:SNIT, YVPKPXXAPTKL:SNIT, TVPKPXXAPTQL:SNIT, AVPKAXXAPTKL:SNIT, GSAGPXXTPTKM:SNIT, AAPASXXVPARL:SNIT, HVPKPXXAPTKL:SNIT, RVPSTXXAPVKT:SNIT, ASAAPXXVPQAL:SNIT, ASASPXXVSQDL:SNIT, ASASPXXVPQDL:SNIT, SSVKXQPSRVHH:SNIT, RNVQXRPTQVQL:SNIT, RNVQXRPSRVQL:RSVK, KIPKAXXVPTEL:RSVK, GIPEPXXVPEKM:RSVK, SIPKAXXVPTEL:RSVK, HVTKPTXAPTKL:RSVK, YVPKPXXAPTKL:RSVK, TVPKPXXAPTQL:RSVK, AVPKAXXAPTKL:RSVK, KVGKAXXVPTKL:RSVK, KASKAXXVPTKL:RSVK, GSAGPXXTPTKM:RSVK, AAPASXXVPARL:RSVK, STPPTXXVPTRL:RSVK, HVPKPXXAPTKL:RSVK, RVPSTXXAPVKT:RSVK, ASAAPXXVPQAL:RSVK, ASASPXXVSQDL:RSVK, ASASPXXVPQDL:RSVK, NDEGLEXVPTEE:RSVK, NDEGLEXVPTGQ:RSVK, RNVQXRPTQVQL:RSVK, SSVKXQPTQVHH:RPVQ, KIPKAXXVPTEL:RPVQ, GIPEPXXVPEKM:RPVQ, SIPKAXXVPTEL:RPVQ, HVTKPTXAPTKL:RPVQ, YVPKPXXAPTKL:RPVQ, TVPKPXXAPTQL:RPVQ, AVPKAXXAPTKL:RPVQ, KVGKAXXVPTKL:RPVQ, KASKAXXVPTKL:RPVQ, GSAGPXXTPTKM:RPVQ, AAPASXXVPARL:RPVQ, STPPTXXVPTRL:RPVQ, HVPKPXXAPTKL:RPVQ, RVPSTXXAPVKT:RPVQ, ASAAPXXVPQAL:RPVQ, ASASPXXVSQDL:RPVQ, ASASPXXVPQDL:RPVQ, NDEGLEXVPTEE:RPVQ, NDEGLEXVPTGQ:RPVQ and SSVKXQPSRVHH:RPVQ.

[0321] In particular, in certain embodiments, the pair PEP3:PEP12 is selected from the group consisting of VPT:SAIS-AA¹⁷-LYL, VPE:SAIS-AA¹⁷-LYL, APT:SAIS-AA¹⁷-LYL, TPT:SAIS-AA¹⁷-LYL, VPA:SAIS-AA¹⁷-LYL, APV:SAIS-AA¹⁷-LYL, VPQ:SAIS-AA¹⁷-LYL, VSQ:SAIS-AA¹⁷-LYL, SRV:SAIS-AA¹⁷-LYL, TQV:SAIS-AA¹⁷-LYL, VPE:SSLS-AA¹⁷-LFF, VPT:SSLS-AA¹⁷-LFF, APT:SSLS-AA¹⁷-LFF, TPT:SSLS-AA¹⁷-LFF, VPA:SSLS-AA¹⁷-LFF, APV:SSLS-AA¹⁷-LFF, VPQ:SSLS-AA¹⁷-LFF, VSQ:SSLS-AA¹⁷-LFF, SRV:SSLS-AA¹⁷-LFF, TQV:SSLS-AA¹⁷-LFF, APT:NAIS-AA¹⁷-LYF, VPT:NAIS-AA¹⁷-LYF, VPE:NAIS-AA¹⁷-LYF, TPT:NAIS-AA¹⁷-LYF, VPA:NAIS-AA¹⁷-LYF, APV:NAIS-AA¹⁷-LYF, VPQ:NAIS-AA¹⁷-LYF, VSQ:NAIS-AA¹⁷-LYF, SRV:NAIS-AA¹⁷-LYF, TQV:NAIS-AA¹⁷-LYF, APT:SATS-AA¹⁷-LYY, VPT:SATS-AA¹⁷-LYY, VPE:SATS-AA¹⁷-LYY, TPT:SATS-AA¹⁷-LYY, VPA:SATS-AA¹⁷-LYY, APV:SATS-AA¹⁷-LYY, VPQ:SATS-AA¹⁷-LYY, VSQ:SATS-AA¹⁷-LYY, SRV:SATS-AA¹⁷-LYY, TQV:SATS-AA¹⁷-LYY, VPT:SPIS-AA¹⁷-LYK, VPE:SPIS-AA¹⁷-LYK, APT:SPIS-AA¹⁷-LYK, TPT:SPIS-AA¹⁷-LYK, VPA:SPIS-AA¹⁷-LYK, APV:SPIS-AA¹⁷-LYK, VPQ:SPIS-AA¹⁷-LYK, VSQ:SPIS-AA¹⁷-LYK, SRV:SPIS-AA¹⁷-LYK, TQV:SPIS-AA¹⁷-LYK, VPT:EPIS-AA¹⁷-LYL, VPE:EPIS-AA¹⁷-LYL, APT:EPIS-AA¹⁷-LYL, TPT:EPIS-AA¹⁷-LYL, VPA:EPIS-AA¹⁷-LYL, APV:EPIS-AA¹⁷-LYL, VPQ:EPIS-AA¹⁷-LYL, VSQ:EPIS-AA¹⁷-LYL, SRV:EPIS-AA¹⁷-LYL, TQV:EPIS-AA¹⁷-LYL, TPT:SPIN-AA¹⁷-LYF, VPT:SPIN-AA¹⁷-LYF, VPE:SPIN-AA¹⁷-LYF, APT:SPIN-AA¹⁷-LYF, VPA:SPIN-AA¹⁷-LYF, APV:SPIN-AA¹⁷-LYF, VPQ:SPIN-AA¹⁷-LYF, VSQ:SPIN-AA¹⁷-LYF, SRV:SPIN-AA¹⁷-LYF, TQV:SPIN-AA¹⁷-LYF, VPA:SPIS-AA¹⁷-LYI, VPT:SPIS-AA¹⁷-LYI, VPE:SPIS-AA¹⁷-LYI, APT:SPIS-AA¹⁷-LYI, TPT:SPIS-AA¹⁷-LYI, APV:SPIS-AA¹⁷-LYI, VPQ:SPIS-AA¹⁷-LYI, VSQ:SPIS-AA¹⁷-LYI, SRV:SPIS-AA¹⁷-LYI, TQV:SPIS-AA¹⁷-LYI, VPT:SPIS-AA¹⁷-LFI, VPE:SPIS-AA¹⁷-LFI, APT:SPIS-AA¹⁷-LFI, TPT:SPIS-AA¹⁷-LFI, VPA:SPIS-AA¹⁷-LFI, APV:SPIS-AA¹⁷-LFI, VPQ:SPIS-AA¹⁷-LFI, VSQ:SPIS-AA¹⁷-LFI, SRV:SPIS-AA¹⁷-LFI, TQV:SPIS-AA¹⁷-LFI, APV:KPLS-AA¹⁷-LYV, VPT:KPLS-AA¹⁷-LYV, VPE:KPLS-AA¹⁷-LYV, APT:KPLS-AA¹⁷-LYV, TPT:KPLS-AA¹⁷-LYV, VPA:KPLS-AA¹⁷-LYV, VPQ:KPLS-AA¹⁷-LYV, VSQ:KPLS-AA¹⁷-LYV, SRV:KPLS-AA¹⁷-LYV, TQV:KPLS-AA¹⁷-LYV, VPQ:EPLP-AA¹⁷-VYY, VPT:EPLP-AA¹⁷-VYY, VPE:EPLP-AA¹⁷-VYY, APT:EPLP-AA¹⁷-VYY, TPT:EPLP-AA¹⁷-VYY, VPA:EPLP-AA¹⁷-VYY, APV:EPLP-AA¹⁷-VYY, VSQ:EPLP-AA¹⁷-VYY, SRV:EPLP-AA¹⁷-VYY, TQV:EPLP-AA¹⁷-VYY, VSQ:EPLT-AA¹⁷-LYY, VPT:EPLT-AA¹⁷-LYY, VPE:EPLT-AA¹⁷-LYY, APT:EPLT-AA¹⁷-LYY, TPT:EPLT-AA¹⁷-LYY, VPA:EPLT-AA¹⁷-LYY, APV:EPLT-AA¹⁷-LYY, VPQ:EPLT-AA¹⁷-LYY, SRV:EPLT-AA¹⁷-LYY, TQV:EPLT-AA¹⁷-LYY, VPT:SNIT-AA¹⁷-QIM, VPE:SNIT-AA¹⁷-QIM, APT:SNIT-AA¹⁷-QIM, TPT:SNIT-AA¹⁷-QIM, VPA:SNIT-AA¹⁷-QIM, APV:SNIT-AA¹⁷-QIM, VPQ:SNIT-AA¹⁷-QIM, VSQ:SNIT-AA¹⁷-QIM, SRV:SNIT-AA¹⁷-QIM, TQV:SNIT-AA¹⁷-QIM, SRV:RSVK-AA¹⁷-AKV, VPT:RSVK-AA¹⁷-AKV, VPE:RSVK-AA¹⁷-AKV, APT:RSVK-AA¹⁷-AKV, TPT:RSVK-AA¹⁷-AKV, VPA:RSVK-AA¹⁷-AKV, APV:RSVK-AA¹⁷-AKV, VPQ:RSVK-AA¹⁷-AKV, VSQ:RSVK-AA¹⁷-AKV, TQV:RSVK-AA¹⁷-AKV, TQV:RPVQ-AA¹⁷-RKI, VPT:RPVQ-AA¹⁷-RKI, VPE:RPVQ-AA¹⁷-RKI, APT:RPVQ-AA¹⁷-RKI, TPT:RPVQ-AA¹⁷-RKI, VPA:RPVQ-AA¹⁷-RKI, APV:RPVQ-AA¹⁷-RKI, VPQ:RPVQ-AA¹⁷-RKI, VSQ:RPVQ-AA¹⁷-RKI and SRV:RPVQ-AA¹⁷-RKI; and wherein AA¹⁷ is selected from the group consisting of G, A, V, L, I, P, F, M, W, T and S (in particular is selected from the group consisting of M, I, L, V and T).

[0322] In particular, in certain embodiments, the pair PEP12:PEP5 is selected from the group consisting of VPTKM:SAIS-AA¹⁷-LYL, VPTKL:SAIS-AA¹⁷-LYL, VPTQL:SAIS-AA¹⁷-LYL, VPTRL:SAIS-AA¹⁷-LYL, VPTKT:SAIS-AA¹⁷-LYL, VPTAL:SAIS-AA¹⁷-LYL, VPTDL:SAIS-AA¹⁷-LYL, VPEKM:SAIS-AA¹⁷-LYL, APTKL:SAIS-AA¹⁷-LYL, APTQL:SAIS-AA¹⁷-LYL, TPTKM:SAIS-AA¹⁷-LYL, VPARL:SAIS-AA¹⁷-LYL, APVKT:SAIS-AA¹⁷-LYL, VPQAL:SAIS-AA¹⁷-LYL, VSQDL:SAIS-AA¹⁷-LYL, VPQDL:SAIS-AA¹⁷-LYL, SRVHH:SAIS-AA¹⁷-LYL, TQVQL:SAIS-AA¹⁷-LYL, VPEEL:SSLS-AA¹⁷-LFF, VPEKL:SSLS-AA¹⁷-LFF, VPEQL:SSLS-AA¹⁷-LFF, VPEKM:SSLS-AA¹⁷-LFF, VPERL:SSLS-AA¹⁷-LFF, VPEKT:SSLS-AA¹⁷-LFF, VPEAL:SSLS-AA¹⁷-LFF, VPEDL:SSLS-AA¹⁷-LFF, VPTEL:SSLS-AA¹⁷-LFF, APTKL:SSLS-AA¹⁷-LFF, APTQL:SSLS-AA¹⁷-LFF, VPTKL:SSLS-AA¹⁷-LFF, TPTKM:SSLS-AA¹⁷-LFF, VPARL:SSLS-AA¹⁷-LFF, VPTRL:SSLS-AA¹⁷-LFF, APVKT:SSLS-AA¹⁷-LFF, VPQAL:SSLS-AA¹⁷-LFF, VSQDL:SSLS-AA¹⁷-LFF, VPQDL:SSLS-AA¹⁷-LFF, VPTEE:SSLS-AA¹⁷-LFF, VPTGQ:SSLS-AA¹⁷-LFF, SRVHH:SSLS-AA¹⁷-LFF, TQVQL:SSLS-AA¹⁷-LFF, APTEL:NAIS-AA¹⁷-LYF, APTKM:NAIS-AA¹⁷-LYF, APTKL:NAIS-AA¹⁷-LYF, APTRL:NAIS-AA¹⁷-LYF, APTKT:NAIS-AA¹⁷-LYF, APTAL:NAIS-AA¹⁷-LYF, APTDL:NAIS-AA¹⁷-LYF, VPTEL:NAIS-AA¹⁷-LYF, VPEKM:NAIS-AA¹⁷-LYF, VPTKL:NAIS-AA¹⁷-LYF, TPTKM:NAIS-AA¹⁷-LYF, VPARL:NAIS-AA¹⁷-LYF, VPTRL:NAIS-AA¹⁷-LYF, APVKT:NAIS-AA¹⁷-LYF, VPQAL:NAIS-AA¹⁷-LYF, VSQDL:NAIS-AA¹⁷-LYF, VPQDL:NAIS-AA¹⁷-LYF, VPTEE:NAIS-AA¹⁷-LYF, VPTGQ:NAIS-AA¹⁷-LYF, SRVHH:NAIS-AA¹⁷-LYF, TQVQL:NAIS-AA¹⁷-LYF, APTEL:SATS-AA¹⁷-LYY, APTKM:SATS-AA¹⁷-LYY, APTKL:SATS-AA¹⁷-LYY, APTQL:SATS-AA¹⁷-LYY, APTRL:SATS-AA¹⁷-LYY, APTKT:SATS-AA¹⁷-LYY, APTAL:SATS-AA¹⁷-LYY, APTDL:SATS-AA¹⁷-LYY, VPTEL:SATS-AA¹⁷-LYY, VPEKM:SATS-AA¹⁷-LYY, VPTKL:SATS-AA¹⁷-LYY, TPTKM:SATS-AA¹⁷-LYY, VPARL:SATS-AA¹⁷-LYY, VPTRL:SATS-AA¹⁷-LYY, APVKT:SATS-AA¹⁷-LYY, VPQAL:SATS-AA¹⁷-LYY, VSQDL:SATS-AA¹⁷-LYY, VPQDL:SATS-AA¹⁷-LYY, VPTEE:SATS-AA¹⁷-LYY, VPTGQ:SATS-AA¹⁷-LYY, SRVHH:SATS-AA¹⁷-LYY, TQVQL:SATS-AA¹⁷-LYY, VPTEL:SPIS-AA¹⁷-LYK, VPTKM:SPIS-AA¹⁷-LYK, VPTKL:SPIS-AA¹⁷-LYK, VPTQL:SPIS-AA¹⁷-LYK, VPTRL:SPIS-AA¹⁷-LYK, VPTKT:SPIS-AA¹⁷-LYK, VPTAL:SPIS-AA¹⁷-LYK, VPTDL:SPIS-AA¹⁷-LYK, VPEKM:SPIS-AA¹⁷-LYK, APTKL:SPIS-AA¹⁷-LYK, APTQL:SPIS-AA¹⁷-LYK, TPTKM:SPIS-AA¹⁷-LYK, VPARL:SPIS-AA¹⁷-LYK, APVKT:SPIS-AA¹⁷-LYK, VPQAL:SPIS-AA¹⁷-LYK, VSQDL:SPIS-AA¹⁷-LYK, VPQDL:SPIS-AA¹⁷-LYK, SRVHH:SPIS-AA¹⁷-LYK, TQVQL:SPIS-AA¹⁷-LYK, VPTEL:EPIS-AA¹⁷-LYL, VPTKM:EPIS-AA¹⁷-LYL, VPTKL:EPIS-AA¹⁷-LYL, VPTQL:EPIS-AA¹⁷-LYL, VPTRL:EPIS-AA¹⁷-LYL, VPTKT:EPIS-AA¹⁷-LYL, VPTAL:EPIS-AA¹⁷-LYL, VPTDL:EPIS-AA¹⁷-LYL, VPEKM:EPIS-AA¹⁷-LYL, APTKL:EPIS-AA¹⁷-LYL, APTQL:EPIS-AA¹⁷-LYL, TPTKM:EPIS-AA¹⁷-LYL, VPARL:EPIS-AA¹⁷-LYL, APVKT:EPIS-AA¹⁷-LYL, VPQAL:EPIS-AA¹⁷-LYL, VSQDL:EPIS-AA¹⁷-LYL, VPQDL:EPIS-AA¹⁷-LYL, SRVHH:EPIS-AA¹⁷-LYL, TQVQL:EPIS-AA¹⁷-LYL, TPTEL:SPIN-AA¹⁷-LYF, TPTKM:SPIN-AA¹⁷-LYF, TPTKL:SPIN-AA¹⁷-LYF, TPTQL:SPIN-AA¹⁷-LYF, TPTRL:SPIN-AA¹⁷-LYF, TPTKT:SPIN-AA¹⁷-LYF, TPTAL:SPIN-AA¹⁷-LYF, TPTDL:SPIN-AA¹⁷-LYF, VPTEL:SPIN-AA¹⁷-LYF, VPEKM:SPIN-AA¹⁷-LYF, APTKL:SPIN-AA¹⁷-LYF, APTQL:SPIN-AA¹⁷-LYF, VPTKL:SPIN-AA¹⁷-LYF, VPARL:SPIN-AA¹⁷-LYF, VPTRL:SPIN-AA¹⁷-LYF, APVKT:SPIN-AA¹⁷-LYF, VPQAL:SPIN-AA¹⁷-LYF, VSQDL:SPIN-AA¹⁷-LYF, VPQDL:SPIN-AA¹⁷-LYF, VPTEE:SPIN-AA¹⁷-LYF, VPTGQ:SPIN-AA¹⁷-LYF, SRVHH:SPIN-AA¹⁷-LYF, TQVQL:SPIN-AA¹⁷-LYF, VPAEL:SPIS-AA¹⁷-LYI, VPAKM:SPIS-AA¹⁷-LYI, VPAKL:SPIS-AA¹⁷-LYI, VPAQL:SPIS-AA¹⁷-LYI, VPARL:SPIS-AA¹⁷-LYI, VPAKT:SPIS-AA¹⁷-LYI, VPAAL:SPIS-AA¹⁷-LYI, VPADL:SPIS-AA¹⁷-LYI, VPTEL:SPIS-AA¹⁷-LYI, VPEKM:SPIS-AA¹⁷-LYI, APTKL:SPIS-AA¹⁷-LYI, APTQL:SPIS-AA¹⁷-LYI, VPTKL:SPIS-AA¹⁷-LYI, TPTKM:SPIS-AA¹⁷-LYI, VPTRL:SPIS-AA¹⁷-LYI, APVKT:SPIS-AA¹⁷-LYI, VPQAL:SPIS-AA¹⁷-LYI, VSQDL:SPIS-AA¹⁷-LYI, VPQDL:SPIS-AA¹⁷-LYI, VPTEE:SPIS-AA¹⁷-LYI, VPTGQ:SPIS-AA¹⁷-LYI, SRVHH:SPIS-AA¹⁷-LYI, TQVQL:SPIS-AA¹⁷-LYI, VPTEL:SPIS-AA¹⁷-LFI, VPTKM:SPIS-AA¹⁷-LFI, VPTKL:SPIS-AA¹⁷-LFI, VPTQL:SPIS-AA¹⁷-LFI, VPTRL:SPIS-AA¹⁷-LFI, VPTKT:SPIS-AA¹⁷-LFI, VPTAL:SPIS-AA¹⁷-LFI, VPTDL:SPIS-AA¹⁷-LFI, VPEKM:SPIS-AA¹⁷-LFI, APTKL:SPIS-AA¹⁷-LFI, APTQL:SPIS-AA¹⁷-LFI, TPTKM:SPIS-AA¹⁷-LFI, VPARL:SPIS-AA¹⁷-LFI, APVKT:SPIS-AA¹⁷-LFI, VPQAL:SPIS-AA¹⁷-LFI, VSQDL:SPIS-AA¹⁷-LFI, VPQDL:SPIS-AA¹⁷-LFI, SRVHH:SPIS-AA¹⁷-LFI, TQVQL:SPIS-AA¹⁷-LFI, APVEL:KPLS-AA¹⁷-LYV, APVKM:KPLS-AA¹⁷-LYV, APVKL:KPLS-AA¹⁷-LYV, APVQL:KPLS-AA¹⁷-LYV, APVRL:KPLS-AA¹⁷-LYV, APVAL:KPLS-AA¹⁷-LYV, APVDL:KPLS-AA¹⁷-LYV, VPTEL:KPLS-AA¹⁷-LYV, VPEKM:KPLS-AA¹⁷-LYV, APTKL:KPLS-AA¹⁷-LYV, APTQL:KPLS-AA¹⁷-LYV, VPTKL:KPLS-AA¹⁷-LYV, TPTKM:KPLS-AA¹⁷-LYV, VPARL:KPLS-AA¹⁷-LYV, VPTRL:KPLS-AA¹⁷-LYV, VPQAL:KPLS-AA¹⁷-LYV, VSQDL:KPLS-AA¹⁷-LYV, VPQDL:KPLS-AA¹⁷-LYV, VPTEE:KPLS-AA¹⁷-LYV, VPTGQ:KPLS-AA¹⁷-LYV, SRVHH:KPLS-AA¹⁷-LYV, TQVQL:KPLS-AA¹⁷-LYV, VPQEL:EPLP-AA¹⁷-VYY, VPQKM:EPLP-AA¹⁷-VYY, VPQKL:EPLP-AA¹⁷-VYY, VPQQL:EPLP-AA¹⁷-VYY, VPQRL:EPLP-AA¹⁷-VYY, VPQKT:EPLP-AA¹⁷-VYY, VPQDL:EPLP-AA¹⁷-VYY, VPTEL:EPLP-AA¹⁷-VYY, VPEKM:EPLP-AA¹⁷-VYY, APTKL:EPLP-AA¹⁷-VYY, APTQL:EPLP-AA¹⁷-VYY, VPTKL:EPLP-AA¹⁷-VYY, TPTKM:EPLP-AA¹⁷-VYY, VPARL:EPLP-AA¹⁷-VYY, VPTRL:EPLP-AA¹⁷-VYY, APVKT:EPLP-AA¹⁷-VYY, VSQDL:EPLP-AA¹⁷-VYY, VPTEE:EPLP-AA¹⁷-VYY, VPTGQ:EPLP-AA¹⁷-VYY, SRVHH:EPLP-AA¹⁷-VYY, TQVQL:EPLP-AA¹⁷-VYY, VSQEL:EPLT-AA¹⁷-LYY, VSQKM:EPLT-AA¹⁷-LYY, VSQKL:EPLT-AA¹⁷-LYY, VSQQL:EPLT-AA¹⁷-LYY, VSQRL:EPLT-AA¹⁷-LYY, VSQKT:EPLT-AA¹⁷-LYY, VSQAL:EPLT-AA¹⁷-LYY, VSQDL:EPLT-AA¹⁷-LYY, VPTEL:EPLT-AA¹⁷-LYY, VPEKM:EPLT-AA¹⁷-LYY, APTKL:EPLT-AA¹⁷-LYY, APTQL:EPLT-AA¹⁷-LYY, VPTKL:EPLT-AA¹⁷-LYY, TPTKM:EPLT-AA¹⁷-LYY, VPARL:EPLT-AA¹⁷-LYY, VPTRL:EPLT-AA¹⁷-LYY, APVKT:EPLT-AA¹⁷-LYY, VPQAL:EPLT-AA¹⁷-LYY, VPTEE:EPLT-AA¹⁷-LYY, VPTGQ:EPLT-AA¹⁷-LYY, SRVHH:EPLT-AA¹⁷-LYY, TQVQL:EPLT-AA¹⁷-LYY, VPQEL:EPLT-AA¹⁷-LYY, VPQKM:EPLT-AA¹⁷-LYY, VPQKL:EPLT-AA¹⁷-LYY, VPQQL:EPLT-AA¹⁷-LYY, VPQRL:EPLT-AA¹⁷-LYY, VPQKT:EPLT-AA¹⁷-LYY, VPQDL:EPLT-AA¹⁷-LYY, VPTGQ:SNIT-AA¹⁷-QIM, VPEKM:SNIT-AA¹⁷-QIM, APTKL:SNIT-AA¹⁷-QIM, APTQL:SNIT-AA¹⁷-QIM, TPTKM:SNIT-AA¹⁷-QIM, VPARL:SNIT-AA¹⁷-QIM, APVKT:SNIT-AA¹⁷-QIM, VPQAL:SNIT-AA¹⁷-QIM, VSQDL:SNIT-AA¹⁷-QIM, VPQDL:SNIT-AA¹⁷-QIM, SRVHH:SNIT-AA¹⁷-QIM, TQVQL:SNIT-AA¹⁷-QIM, SRVQL:RSVK-AA¹⁷-AKV, VPTEL:RSVK-AA¹⁷-AKV, VPEKM:RSVK-AA¹⁷-AKV, APTKL:RSVK-AA¹⁷-AKV, APTQL:RSVK-AA¹⁷-AKV, VPTKL:RSVK-AA¹⁷-AKV, TPTKM:RSVK-AA¹⁷-AKV, VPARL:RSVK-AA¹⁷-AKV, VPTRL:RSVK-AA¹⁷-AKV, APVKT:RSVK-AA¹⁷-AKV, VPQAL:RSVK-AA¹⁷-AKV, VSQDL:RSVK-AA¹⁷-AKV, VPQDL:RSVK-AA¹⁷-AKV, VPTEE:RSVK-AA¹⁷-AKV, VPTGQ:RSVK-AA¹⁷-AKV, TQVQL:RSVK-AA¹⁷-AKV, TQVHH:RPVQ-AA¹⁷-RKI, VPTEL:RPVQ-AA¹⁷-RKI, VPEKM:RPVQ-AA¹⁷-RKI, APTKL:RPVQ-AA¹⁷-RKI, APTQL:RPVQ-AA¹⁷-RKI, VPTKL:RPVQ-AA¹⁷-RKI, TPTKM:RPVQ-AA¹⁷-RKI, VPARL:RPVQ-AA¹⁷-RKI, VPTRL:RPVQ-AA¹⁷-RKI, APVKT:RPVQ-AA¹⁷-RKI, VPQAL:RPVQ-AA¹⁷-RKI, VSQDL:RPVQ-AA¹⁷-RKI, VPQDL:RPVQ-AA¹⁷-RKI, VPTEE:RPVQ-AA¹⁷-RKI, VPTGQ:RPVQ-AA¹⁷-RKI and SRVHH:RPVQ-AA¹⁷-RKI; and wherein AA¹⁷ is selected from the group consisting of G, A, V, L, I, P, F, M, W, T and S (in particular is selected from the group consisting of M, I, L, V and T).

[0323] In particular, in certain embodiments, the pair PEP12:PEP7 is selected from the group consisting of GIPEPXX:SAIS-AA¹⁷-LYL, HVTKPTX:SAIS-AA¹⁷-LYL, YVPKPXX:SAIS-AA¹⁷-LYL, TVPKPXX:SAIS-AA¹⁷-LYL, AVPKAXX:SAIS-AA¹⁷-LYL, KVGKAXX:SAIS-AA¹⁷-LYL, KASKAXX:SAIS-AA¹⁷-LYL, GSAGPXX:SAIS-AA¹⁷-LYL, AAPASXX:SAIS-AA¹⁷-LYL, STPPTXX:SAIS-AA¹⁷-LYL, HVPKPXX:SAIS-AA¹⁷-LYL, RVPSTXX:SAIS-AA¹⁷-LYL, ASAAPXX:SAIS-AA¹⁷-LYL, ASASAPXX:SAIS-AA¹⁷-LYL, SSVKXQP:SAIS-AA¹⁷-LYL, RNVQXRP:SAIS-AA¹⁷-LYL, KIPKAXX:SSLS-AA¹⁷-LFF, SIPKAXX:SSLS-AA¹⁷-LFF, HVTKPTX:SSLS-AA¹⁷-LFF, YVPKPXX:SSLS-AA¹⁷-LFF, TVPKPXX:SSLS-AA¹⁷-LFF, AVPKAXX:SSLS-AA¹⁷-LFF, KVGKAXX:SSLS-AA¹⁷-LFF, KASKAXX:SSLS-AA¹⁷-LFF, GSAGPXX:SSLS-AA¹⁷-LFF, AAPASXX:SSLS-AA¹⁷-LFF, STPPTXX:SSLS-AA¹⁷-LFF, HVPKPXX:SSLS-AA¹⁷-LFF, RVPSTXX:SSLS-AA¹⁷-LFF, ASAAPXX:SSLS-AA¹⁷-LFF, ASASPXX:SSLS-AA¹⁷-LFF, NDEGLEX:SSLS-AA¹⁷-LFF, SSVKXQP:SSLS-AA¹⁷-LFF, RNVQXRP:SSLS-AA¹⁷-LFF, KIPKAXX:NAIS-AA¹⁷-LYF, GIPEPXX:NAIS-AA¹⁷-LYF, SIPKAXX:NAIS-AA¹⁷-LYF, AVPKAXX:NAIS-AA¹⁷-LYF, KVGKAXX:NAIS-AA¹⁷-LYF, KASKAXX:NAIS-AA¹⁷-LYF, GSAGPXX:NAIS-AA¹⁷-LYF, AAPASXX:NAIS-AA¹⁷-LYF, STPPTXX:NAIS-AA¹⁷-LYF, RVPSTXX:NAIS-AA¹⁷-LYF, ASAAPXX:NAIS-AA¹⁷-LYF, ASASPXX:NAIS-AA¹⁷-LYF, NDEGLEX:NAIS-AA¹⁷-LYF, SSVKXQP:NAIS-AA¹⁷-LYF, RNVQXRP:NAIS-AA¹⁷-LYF, KIPKAXX:SATS-AA¹⁷-LYY, GIPEPXX:SATS-AA¹⁷-LYY, SIPKAXX:SATS-AA¹⁷-LYY, HVTKPTX:SATS-AA¹⁷-LYY, YVPKPXX:SATS-AA¹⁷-LYY, TVPKPXX:SATS-AA¹⁷-LYY, KVGKAXX:SATS-AA¹⁷-LYY, KASKAXX:SATS-AA¹⁷-LYY, GSAGPXX:SATS-AA¹⁷-LYY, AAPASXX:SATS-AA¹⁷-LYY, STPPTXX:SATS-AA¹⁷-LYY, HVPKPXX:SATS-AA¹⁷-LYY, RVPSTXX:SATS-AA¹⁷-LYY, ASAAPXX:SATS-AA¹⁷-LYY, ASASAPXX:SATS-AA¹⁷-LYY, NDEGLEX:SATS-AA¹⁷-LYY, SSVKXQP:SATS-AA¹⁷-LYY, RNVQXRP:SATS-AA¹⁷-LYY, KIPKAXX:SPIS-AA¹⁷-LYK, GIPEPXX:SPIS-AA¹⁷-LYK, SIPKAXX:SPIS-AA¹⁷-LYK, HVTKPTX:SPIS-AA¹⁷-LYK, YVPKPXX:SPIS-AA¹⁷-LYK, TVPKPXX:SPIS-AA¹⁷-LYK, AVPKAXX:SPIS-AA¹⁷-LYK, KASKAXX:SPIS-AA¹⁷-LYK, GSAGPXX:SEPIS-AA¹⁷-LYK, AAPASXX:SPIS-AA¹⁷-LYK, STPPTXX:SPIS-AA¹⁷-LYK, HVPKPXX:SPIS-AA¹⁷-LYK, RVPSTXX:SPIS-AA¹⁷-LYK, ASAAPXX:SPIS-AA¹⁷-LYK, ASASPXX:SPIS-AA¹⁷-LYK, SSVKXQP:SPIS-AA¹⁷-LYK, RNVQXRP:SPIS-AA¹⁷-LYK, KIPKAXX:EPIS-AA¹⁷-LYL, GIPEPXX:EPIS-AA¹⁷-LYL, SIPKAXX:EPIS-AA¹⁷-LYL, HVTKPTX:EPIS-AA¹⁷-LYL, YVPKPXX:EPIS-AA¹⁷-LYL, TVPKPXX:EPIS-AA¹⁷-LYL, AVPKAXX:EPIS-AA¹⁷-LYL, KVGKAXX:EPIS-AA¹⁷-LYL, GSAGPXX:EPIS-AA¹⁷-LYL, AAPASXX:EPIS-AA¹⁷-LYL, STPPTXX:EPIS-AA¹⁷-LYL, HVPKPXX:EPIS-AA¹⁷-LYL, RVPSTXX:EPIS-AA¹⁷-LYL, ASAAPXX:EPIS-AA¹⁷-LYL, ASASPXX:EPIS-AA¹⁷-LYL, SSVKXQP:EPIS-AA¹⁷-LYL, RNVQXRP:EPIS-AA¹⁷-LYL, KIPKAXX:SPIN-AA¹⁷-LYF, GIPEPXX:SPIN-AA¹⁷-LYF, SIPKAXX:SPIN-AA¹⁷-LYF, HVTKPTX:SPIN-AA¹⁷-LYF, YVPKPXX:SPIN-AA¹⁷-LYF, TVPKPXX:SPIN-AA¹⁷-LYF, AVPKAXX:SPIN-AA¹⁷-LYF, KVGKAXX:SPIN-AA¹⁷-LYF, KASKAXX:SPIN-AA¹⁷-LYF, AAPASXX:SPIN-AA¹⁷-LYF, STPPTXX:SPIN-AA¹⁷-LYF, HVPKPXX:SPIN-AA¹⁷-LYF, RVPSTXX:SPIN-AA¹⁷-LYF, ASAAPXX:SPIN-AA¹⁷-LYF, ASASPXX:SPIN-AA¹⁷-LYF, NDEGLEX:SPIN-AA¹⁷-LYF, SSVKXQP:SPIN-AA¹⁷-LYF, RNVQXRP:SPIN-AA¹⁷-LYF, KIPKAXX:SPIS-AA¹⁷-LYI, GIPEPXX:SPIS-AA¹⁷-LYI, SIPKAXX:SPIS-AA¹⁷-LYI, HVTKPTX:SPIS-AA¹⁷-LYI, YVPKPXX:SPIS-AA¹⁷-LYI, TVPKPXX:SPIS-AA¹⁷-LYI, AVPKAXX:SPIS-AA¹⁷-LYI, KVGKAXX:SPIS-AA¹⁷-LYI, KASKAXX:SPIS-AA¹⁷-LYI, GSAGPXX:SPIS-AA¹⁷-LYI, STPPTXX:SPIS-AA¹⁷-LYI, HVPKPXX:SPIS-AA¹⁷-LYI, RVPSTXX:SPIS-AA¹⁷-LYI, ASAAPXX:SPIS-AA¹⁷-LYI, ASASPXX:SPIS-AA¹⁷-LYI, NDEGLEX:SPIS-AA¹⁷-LYI, SSVKXQP:SPIS-AA¹⁷-LYI, RNVQXRP:SPIS-AA¹⁷-LYI, KIPKAXX:SPIS-AA¹⁷-LFI, GIPEPXX:SPIS-AA¹⁷-LFI, SIPKAXX:SPIS-AA¹⁷-LFI, HVTKPTX:SPIS-AA¹⁷-LFI, YVPKPXX:SPIS-AA¹⁷-LFI, TVPKPXX:SPIS-AA¹⁷-LFI, AVPKAXX:SPIS-AA¹⁷-LFI, KVGKAXX:SPIS-AA¹⁷-LFI, KASKAXX:SPIS-AA¹⁷-LFI, GSAGPXX:SPIS-AA¹⁷-LFI, AAPASXX:SPIS-AA¹⁷-LFI, HVPKPXX:SPIS-AA¹⁷-LFI, RVPSTXX:SPIS-AA¹⁷-LFI, ASAAPXX:SPIS-AA¹⁷-LFI, ASASPXX:SPIS-AA¹⁷-LFI, SSVKXQP:SPIS-AA¹⁷-LFI, RNVQXRP:SPIS-AA¹⁷-LFI, KIPKAXX:KPLS-AA¹⁷-LYV, GIPEPXX:KPLS-AA¹⁷-LYV, SIPKAXX:KPLS-AA¹⁷-LYV, HVTKPTX:KPLS-AA¹⁷-LYV, YVPKPXX:KPLS-AA¹⁷-LYV, TVPKPXX:KPLS-AA¹⁷-LYV, AVPKAXX:KPLS-AA¹⁷-LYV, KVGKAXX:KPLS-AA¹⁷-LYV, KASKAXX:KPLS-AA¹⁷-LYV, GSAGPXX:KPLS-AA¹⁷-LYV, AAPASXX:KPLS-AA¹⁷-LYV, STPPTXX:KPLS-AA¹⁷-LYV, HVPKPXX:KPLS-AA¹⁷-LYV, ASAAPXX:KPLS-AA¹⁷-LYV, ASASPXX:KPLS-AA¹⁷-LYV, NDEGLEX:KPLS-AA¹⁷-LYV, SSVKXQP:KPLS-AA¹⁷-LYV, RNVQXRP:KPLS-AA¹⁷-LYV, KIPKAXX:EPLP-AA¹⁷-VYY, GIPEPXX:EPLP-AA¹⁷-VYY, SIPKAXX:EPLP-AA¹⁷-VYY, HVTKPTX:EPLP-AA¹⁷-VYY, YVPKPXX:EPLP-AA¹⁷-VYY, TVPKPXX:EPLP-AA¹⁷-VYY, AVPKAXX:EPLP-AA¹⁷-VYY, KVGKAXX:EPLP-AA¹⁷-VYY, KASKAXX:EPLP-AA¹⁷-VYY, GSAGPXX:EPLP-AA¹⁷-VYY, AAPASXX:EPLP-AA¹⁷-VYY, STPPTXX:EPLP-AA¹⁷-VYY, HVPKPXX:EPLP-AA¹⁷-VYY, RVPSTXX:EPLP-AA¹⁷-VYY, ASASPXX:EPLP-AA¹⁷-VYY, NDEGLEX:EPLP-AA¹⁷-VYY, SSVKXQP:EPLP-AA¹⁷-VYY, RNVQXRP:EPLP-AA¹⁷-VYY, KIPKAXX:EPLT-AA¹⁷-LYY, GIPEPXX:EPLT-AA¹⁷-LYY, SIPKAXX:EPLT-AA¹⁷-LYY, HVTKPTX:EPLT-AA¹⁷-LYY, YVPKPXX:EPLT-AA¹⁷-LYY, TVPKPXX:EPLT-AA¹⁷-LYY, AVPKAXX:EPLT-AA¹⁷-LYY, KVGKAXX:EPLT-AA¹⁷-LYY, KASKAXX:EPLT-AA¹⁷-LYY, GSAGPXX:EPLT-AA¹⁷-LYY, AAPASXX:EPLT-AA¹⁷-LYY, STPPTXX:EPLT-AA¹⁷-LYY, HVPKPXX:EPLT-AA¹⁷-LYY, RVPSTXX:EPLT-AA¹⁷-LYY, ASAAPXX:EPLT-AA¹⁷-LYY, ASASPXX:EPLT-AA¹⁷-LYY, NDEGLEX:EPLT-AA¹⁷-LYY, SSVKXQP:EPLT-AA¹⁷-LYY, RNVQXRP:EPLT-AA¹⁷-LYY, NDEGLEX:SNIT-AA¹⁷-QIM, GIPEPXX:SNIT-AA¹⁷-QIM, HVTKPTX:SNIT-AA¹⁷-QIM, YVPKPXX:SNIT-AA¹⁷-QIM, TVPKPXX:SNIT-AA¹⁷-QIM, AVPKAXX:SNIT-AA¹⁷-QIM, GSAGPXX:SNIT-AA¹⁷-QIM, AAPASXX:SNIT-AA¹⁷-QIM, HVPKPXX:SNIT-AA¹⁷-QIM, RVPSTXX:SNIT-AA¹⁷-QIM, ASAAPXX:SNIT-AA¹⁷-QIM, ASASPXX:SNIT-AA¹⁷-QIM, SSVKXQP:SNIT-AA¹⁷-QIM, RNVQXRP:SNIT-AA¹⁷-QIM, RNVQXRP:RSVK-AA¹⁷-AKV, KIPKAXX:RSVK-AA¹⁷-AKV, GIPEPXX:RSVK-AA¹⁷-AKV, SIPKAXX:RSVK-AA¹⁷-AKV, HVTKPTX:RSVK-AA¹⁷-AKV, YVPKPXX:RSVK-AA¹⁷-AKV, TVPKPXX:RSVK-AA¹⁷-AKV, AVPKAXX:RSVK-AA¹⁷-AKV, KVGKAXX:RSVK-AA¹⁷-AKV, KASKAXX:RSVK-AA¹⁷-AKV, GSAGPXX:RSVK-AA¹⁷-AKV, AAPASXX:RSVK-AA¹⁷-AKV, STPPTXX:RSVK-AA¹⁷-AKV, HVPKPXX:RSVK-AA¹⁷-AKV, RVPSTXX:RSVK-AA¹⁷-AKV, ASAAPXX:RSVK-AA¹⁷-AKV, ASASPXX:RSVK-AA¹⁷-AKV, NDEGLEX:RSVK-AA¹⁷-AKV, SSVKXQP:RPVQ-AA¹⁷-RKI, KIPKAXX:RPVQ-AA¹⁷-RKI, GIPEPXX:RPVQ-AA¹⁷-RKI, SIPKAXX:RPVQ-AA¹⁷-RKI, HVTKPTX:RPVQ-AA¹⁷-RKI, YVPKPXX:RPVQ-AA¹⁷-RKI, TVPKPXX:RPVQ-AA¹⁷-RKI, AVPKAXX:RPVQ-AA¹⁷-RKI, KVGKAXX:RPVQ-AA¹⁷-RKI, KASKAXX:RPVQ-AA¹⁷-RKI, GSAGPXX:RPVQ-AA¹⁷-RKI, AAPASXX:RPVQ-AA¹⁷-RKI, STPPTXX:RPVQ-AA¹⁷-RKI, HVPKPXX:RPVQ-AA¹⁷-RKI, RVPSTXX:RPVQ-AA¹⁷-RKI, ASAAPXX:RPVQ-AA¹⁷-RKI, ASASPXX:RPVQ-AA¹⁷-RKI and NDEGLEX:RPVQ-AA¹⁷-RKI; and wherein AA¹⁷ is selected from the group consisting of G, A, V, L, I, P, F, M, W, T and S (in particular is selected from the group consisting of M, I, L, V and T).

[0324] In particular, in certain embodiments, the pair PEP12:PEP9 is selected from the group consisting of GIPEPXXVPTKM:SAIS-AA¹⁷-LYL, HVTKPTXVPTKL:SAIS-AA¹⁷-LYL, YVPKPXXVPTKL:SAIS-AA¹⁷-LYL, TVPKPXXVPTQL:SAIS-AA¹⁷-LYL, AVPKAXXVPTKL:SAIS-AA¹⁷-LYL, KVGKAXXVPTKL:SAIS-AA¹⁷-LYL, KASKAXXVPTKL:SAIS-AA¹⁷-LYL, GSAGPXXVPTKM:SAIS-AA¹⁷-LYL, AAPASXXVPTRL:SAIS-AA¹⁷-LYL, STPPTXXVPTRL:SAIS-AA¹⁷-LYL, HVPKPXXVPTKL:SAIS-AA¹⁷-LYL, RVPSTXXVPTKT:SAIS-AA¹⁷-LYL, ASAAPXXVPTAL:SAIS-AA¹⁷-LYL, ASASPXXVPTDL:SAIS-AA¹⁷-LYL, GIPEPXXVPEKM:SAIS-AA¹⁷-LYL, HVTKPTXAPTKL:SAIS-AA¹⁷-LYL, YVPKPXXAPTKL:SAIS-AA¹⁷-LYL, TVPKPXXAPTQL:SAIS-AA¹⁷-LYL, AVPKAXXAPTKL:SAIS-AA¹⁷-LYL, GSAGPXXTPTKM:SAIS-AA¹⁷-LYL, AAPASXXVPARL:SAIS-AA¹⁷-LYL, HVPKPXXAPTKL:SAIS-AA¹⁷-LYL, RVPSTXXAPVKT:SAIS-AA¹⁷-LYL, ASAAPXXVPQAL:SAIS-AA¹⁷-LYL, ASASPXXVSQDL:SAIS-AA¹⁷-LYL, ASASPXXVPQDL:SAIS-AA¹⁷-LYL, SSVKXQPSRVHH:SAIS-AA¹⁷-LYL, RNVQXRPTQVQL:SAIS-AA¹⁷-LYL, KIPKAXXVPEEL:SSLS-AA¹⁷-LFF, SIPKAXXVPEEL:SSLS-AA¹⁷-LFF, HVTKPTXVPEKL:SSLS-AA¹⁷-LFF, YVPKPXXVPEKL:SSLS-AA¹⁷-LFF, TVPKPXXVPEQL:SSLS-AA¹⁷-LFF, AVPKAXXVPEKL:SSLS-AA¹⁷-LFF, KVGKAXXVPEKL:SSLS-AA¹⁷-LFF, KASKAXXVPEKL:SSLS-AA¹⁷-LFF, GSAGPXXVPEKM:SSLS-AA¹⁷-LFF, AAPASXXVPERL:SSLS-AA¹⁷-LFF, STPPTXXVPERL:SSLS-AA¹⁷-LFF, HVPKPXXVPEKL:SSLS-AA¹⁷-LFF, RVPSTXXVPEKT:SSLS-AA¹⁷-LFF, ASAAPXXVPEAL:SSLS-AA¹⁷-LFF, ASASPXXVPEDL:SSLS-AA¹⁷-LFF, KIPKAXXVPTEL:SSLS-AA¹⁷-LFF, SIPKAXXVPTEL:SSLS-AA¹⁷-LFF, HVTKPTXAPTKL:SSLS-AA¹⁷-LFF, YVPKPXXAPTKL:SSLS-AA¹⁷-LFF, TVPKPXXAPTQL:SSLS-AA¹⁷-LFF, AVPKAXXAPTKL:SSLS-AA¹⁷-LFF, KVGKAXXVPTKL:SSLS-AA¹⁷-LFF, KASKAXXVPTKL:SSLS-AA¹⁷-LFF, GSAGPXXTPTKM:SSLS-AA¹⁷-LFF, AAPASXXVPARL:SSLS-AA¹⁷-LFF, STPPTXXVPTRL:SSLS-AA¹⁷-LFF, HVPKPXXAPTKL:SSLS-AA¹⁷-LFF, RVPSTXXAPVKT:SSLS-AA¹⁷-LFF, ASAAPXXVPQAL:SSLS-AA¹⁷-LFF, ASASPXXVSQDL:SSLS-AA¹⁷-LFF, ASASPXXVPQDL:SSLS-AA¹⁷-LFF, NDEGLEXVPTEE:SSLS-AA¹⁷-LFF, NDEGLEXVPTGQ:SSLS-AA¹⁷-LFF, SSVKXQPSRVHH:SSLS-AA¹⁷-LFF, RNVQXRPTQVQL:SSLS-AA¹⁷-LFF, KIPKAXXAPTEL:NAIS-AA¹⁷-LYF, GIPEPXXAPTKM:NAIS-AA¹⁷-LYF, SIPKAXXAPTEL:NAIS-AA¹⁷-LYF, AVPKAXXAPTKL:NAIS-AA¹⁷-LYF, KVGKAXXAPTKL:NAIS-AA¹⁷-LYF, KASKAXXAPTKL:NAIS-AA¹⁷-LYF, GSAGPXXAPTKM:NAIS-AA¹⁷-LYF, AAPASXXAPTRL:NAIS-AA¹⁷-LYF, STPPTXXAPTRL:NAIS-AA¹⁷-LYF, RVPSTXXAPTKT:NAIS-AA¹⁷-LYF, ASAAPXXAPTAL:NAIS-AA¹⁷-LYF, ASASPXXAPTDL:NAIS-AA¹⁷-LYF, KIPKAXXVPTEL:NAIS-AA¹⁷-LYF, GIPEPXXVPEKM:NAIS-AA¹⁷-LYF, SIPKAXXVPTEL:NAIS-AA¹⁷-LYF, KVGKAXXVPTKL:NAIS-AA¹⁷-LYF, KASKAXXVPTKL:NAIS-AA¹⁷-LYF, GSAGPXXTPTKM:NAIS-AA¹⁷-LYF, AAPASXXVPARL:NAIS-AA¹⁷-LYF, STPPTXXVPTRL:NAIS-AA¹⁷-LYF, RVPSTXXAPVKT:NAIS-AA¹⁷-LYF, ASAAPXXVPQAL:NAIS-AA¹⁷-LYF, ASASPXXVSQDL:NAIS-AA¹⁷-LYF, ASASPXXVPQDL:NAIS-AA¹⁷-LYF, NDEGLEXVPTEE:NAIS-AA¹⁷-LYF, NDEGLEXVPTGQ:NAIS-AA¹⁷-LYF, SSVKXQPSRVHH:NAIS-AA¹⁷-LYF, RNVQXRPTQVQL:NAIS-AA¹⁷-LYF, KIPKAXXAPTEL:SATS-AA¹⁷-LYY, GIPEPXXAPTKM:SATS-AA¹⁷-LYY, SIPKAXXAPTEL:SATS-AA¹⁷-LYY, HVTKPTXAPTKL:SATS-AA¹⁷-LYY, YVPKPXXAPTKL:SATS-AA¹⁷-LYY, TVPKPXXAPTQL:SATS-AA¹⁷-LYY, KVGKAXXAPTKL:SATS-AA¹⁷-LYY, KASKAXXAPTKL:SATS-AA¹⁷-LYY, GSAGPXXAPTKM:SATS-AA¹⁷-LYY, AAPASXXAPTRL:SATS-AA¹⁷-LYY, STPPTXXAPTRL:SATS-AA¹⁷-LYY, HVPKPXXAPTKL:SATS-AA¹⁷-LYY, RVPSTXXAPTKT:SATS-AA¹⁷-LYY, ASAAPXXAPTAL:SATS-AA¹⁷-LYY, ASASPXXAPTDL:SATS-AA¹⁷-LYY, KIPKAXXVPTEL:SATS-AA¹⁷-LYY, GIPEPXXVPEKM:SATS-AA¹⁷-LYY, SIPKAXXVPTEL:SATS-AA¹⁷-LYY, KVGKAXXVPTKL:SATS-AA¹⁷-LYY, KASKAXXVPTKL:SATS-AA¹⁷-LYY, GSAGPXXTPTKM:SATS-AA¹⁷-LYY, AAPASXXVPARL:SATS-AA¹⁷-LYY, STPPTXXVPTRL:SATS-AA¹⁷-LYY, RVPSTXXAPVKT:SATS-AA¹⁷-LYY, ASAAPXXVPQAL:SATS-AA¹⁷-LYY, ASASPXXVSQDL:SATS-AA¹⁷-LYY, ASASPXXVPQDL:SATS-AA¹⁷-LYY, NDEGLEXVPTEE:SATS-AA¹⁷-LYY, NDEGLEXVPTGQ:SATS-AA¹⁷-LYY, SSVKXQPSRVHH:SATS-AA¹⁷-LYY, RNVQXRPTQVQL:SATS-AA¹⁷-LYY, KIPKAXXVPTEL:SPIS-AA¹⁷-LYK, GIPEPXXVPTKM:SPIS-AA¹⁷-LYK, SIPKAXXVPTEL:SPIS-AA¹⁷-LYK, HVTKPTXVPTKL:SPIS-AA¹⁷-LYK, YVPKPXXVPTKL:SPIS-AA¹⁷-LYK, TVPKPXXVPTQL:SPIS-AA¹⁷-LYK, AVPKAXXVPTKL:SPIS-AA¹⁷-LYK, KASKAXXVPTKL:SPIS-AA¹⁷-LYK, GSAGPXXVPTKM:SPIS-AA¹⁷-LYK, AAPASXXVPTRL:SPIS-AA¹⁷-LYK, STPPTXXVPTRL:SPIS-AA¹⁷-LYK, HVPKPXXVPTKL:SPIS-AA¹⁷-LYK, RVPSTXXVPTKT:SPIS-AA¹⁷-LYK, ASAAPXXVPTAL:SPIS-AA¹⁷-LYK, ASASPXXVPTDL:SPIS-AA¹⁷-LYK, GIPEPXXVPEKM:SPIS-AA¹⁷-LYK, HVTKPTXAPTKL:SPIS-AA¹⁷-LYK, YVPKPXXAPTKL:SPIS-AA¹⁷-LYK, TVPKPXXAPTQL:SPIS-AA¹⁷-LYK, AVPKAXXAPTKL:SPIS-AA¹⁷-LYK, GSAGPXXTPTKM:SPIS-AA¹⁷-LYK, AAPASXXVPARL:SPIS-AA¹⁷-LYK, HVPKPXXAPTKL:SPIS-AA¹⁷-LYK, RVPSTXXAPVKT:SPIS-AA¹⁷-LYK, ASAAPXXVPQAL:SPIS-AA¹⁷-LYK, ASASPXXVSQDL:SPIS-AA¹⁷-LYK, ASASPXXVPQDL:SPIS-AA¹⁷-LYK, SSVKXQPSRVHH:SPIS-AA¹⁷-LYK, RNVQXRPTQVQL:SPIS-AA¹⁷-LYK, KIPKAXXVPTEL:EPIS-AA¹⁷-LYL, GIPEPXXVPTKM:EPIS-AA¹⁷-LYL, SIPKAXXVPTEL:EPIS-AA¹⁷-LYL, HVTKPTXVPTKL:EPIS-AA¹⁷-LYL, YVPKPXXVPTKL:EPIS-AA¹⁷-LYL, TVPKPXXVPTQL:EPIS-AA¹⁷-LYL, AVPKAXXVPTKL:EPIS-AA¹⁷-LYL, KVGKAXXVPTKL:EPIS-AA¹⁷-LYL, GSAGPXXVPTKM:EPIS-AA¹⁷-LYL, AAPASXXVPTRL:EPIS-AA¹⁷-LYL, STPPTXXVPTRL:EPIS-AA¹⁷-LYL, HVPKPXXVPTKL:EPIS-AA¹⁷-LYL, RVPSTXXVPTKT:EPIS-AA¹⁷-LYL, ASAAPXXVPTAL:EPIS-AA¹⁷-LYL, ASASPXXVPTDL:EPIS-AA¹⁷-LYL, GIPEPXXVPEKM:EPIS-AA¹⁷-LYL, HVTKPTXAPTKL:EPIS-AA¹⁷-LYL, YVPKPXXAPTKL:EPIS-AA¹⁷-LYL, TVPKPXXAPTQL:EPIS-AA¹⁷-LYL, AVPKAXXAPTKL:EPIS-AA¹⁷-LYL, GSAGPXXTPTKM:EPIS-AA¹⁷-LYL, AAPASXXVPARL:EPIS-AA¹⁷-LYL, HVPKPXXAPTKL:EPIS-AA¹⁷-LYL, RVPSTXXAPVKT:EPIS-AA¹⁷-LYL, ASAAPXXVPQAL:EPIS-AA¹⁷-LYL, ASASPXXVSQDL:EPIS-AA¹⁷-LYL, ASASPXXVPQDL:EPIS-AA¹⁷-LYL, SSVKXQPSRVHH:EPIS-AA¹⁷-LYL, RNVQXRPTQVQL:EPIS-AA¹⁷-LYL, KIPKAXXTPTEL:SPIN-AA¹⁷-LYF, GIPEPXXTPTKM:SPIN-AA¹⁷-LYF, SIPKAXXTPTEL:SPIN-AA¹⁷-LYF, HVTKPTXTPTKL:SPIN-AA¹⁷-LYF, YVPKPXXTPTKL:SPIN-AA¹⁷-LYF, TVPKPXXTPTQL:SPIN-AA¹⁷-LYF, AVPKAXXTPTKL:SPIN-AA¹⁷-LYF, KVGKAXXTPTKL:SPIN-AA¹⁷-LYF, KASKAXXTPTKL:SPIN-AA¹⁷-LYF, AAPASXXTPTRL:SPIN-AA¹⁷-LYF, STPPTXXTPTRL:SPIN-AA¹⁷-LYF, HVPKPXXTPTKL:SPIN-AA¹⁷-LYF, RVPSTXXTPTKT:SPIN-AA¹⁷-LYF, ASAAPXXTPTAL:SPIN-AA¹⁷-LYF, ASASPXXTPTDL:SPIN-AA¹⁷-LYF, KIPKAXXVPTEL:SPIN-AA¹⁷-LYF, GIPEPXXVPEKM:SPIN-AA¹⁷-LYF, SIPKAXXVPTEL:SPIN-AA¹⁷-LYF, HVTKPTXAPTKL:SPIN-AA¹⁷-LYF, YVPKPXXAPTKL:SPIN-AA¹⁷-LYF, TVPKPXXAPTQL:SPIN-AA¹⁷-LYF, AVPKAXXAPTKL:SPIN-AA¹⁷-LYF, KVGKAXXVPTKL:SPIN-AA¹⁷-LYF, KASKAXXVPTKL:SPIN-AA¹⁷-LYF, AAPASXXVPARL:SPIN-AA¹⁷-LYF, STPPTXXVPTRL:SPIN-AA¹⁷-LYF, HVPKPXXAPTKL:SPIN-AA¹⁷-LYF, RVPSTXXAPVKT:SPIN-AA¹⁷-LYF, ASAAPXXVPQAL:SPIN-AA¹⁷-LYF, ASASPXXVSQDL:SPIN-AA¹⁷-LYF, ASASPXXVPQDL:SPIN-AA¹⁷-LYF, NDEGLEXVPTEE:SPIN-AA¹⁷-LYF, NDEGLEXVPTGQ:SPIN-AA¹⁷-LYF, SSVKXQPSRVHH:SPIN-AA¹⁷-LYF, RNVQXRPTQVQL:SPIN-AA¹⁷-LYF, KIPKAXXVPAEL:SPIS-AA¹⁷-LYI, GIPEPXXVPAKM:SPIS-AA¹⁷-LYI, SIPKAXXVPAEL:SPIS-AA¹⁷-LYI, HVTKPTXVPAKL:SPIS-AA¹⁷-LYI, YVPKPXXVPAKL:SPIS-AA¹⁷-LYI, TVPKPXXVPAQL:SPIS-AA¹⁷-LYI, AVPKAXXVPAKL:SPIS-AA¹⁷-LYI, KVGKAXXVPAKL:SPIS-AA¹⁷-LYI, KASKAXXVPAKL:SPIS-AA¹⁷-LYI, GSAGPXXVPAKM:SPIS-AA¹⁷-LYI, STPPTXXVPARL:SPIS-AA¹⁷-LYI, HVPKPXXVPAKL:SPIS-AA¹⁷-LYI, RVPSTXXVPAKT:SPIS-AA¹⁷-LYI, ASAAPXXVPAAL:SPIS-AA¹⁷-LYI, ASASPXXVPADL:SPIS-AA¹⁷-LYI, KIPKAXXVPTEL:SPIS-AA¹⁷-LYI, GIPEPXXVPEKM:SPIS-AA¹⁷-LYI, SIPKAXXVPTEL:SPIS-AA¹⁷-LYI, HVTKPTXAPTKL:SPIS-AA¹⁷-LYI, YVPKPXXAPTKL:SPIS-AA¹⁷-LYI, TVPKPXXAPTQL:SPIS-AA¹⁷-LYI, AVPKAXXAPTKL:SPIS-AA¹⁷-LYI, KVGKAXXVPTKL:SPIS-AA¹⁷-LYI, KASKAXXVPTKL:SPIS-AA¹⁷-LYI, GSAGPXXTPTKM:SPIS-AA¹⁷-LYI, STPPTXXVPTRL:SPIS-AA¹⁷-LYI, HVPKPXXAPTKL:SPIS-AA¹⁷-LYI, RVPSTXXAPVKT:SPIS-AA¹⁷-LYI, ASAAPXXVPQAL:SPIS-AA¹⁷-LYI, ASASPXXVSQDL:SPIS-AA¹⁷-LYI, ASASPXXVPQDL:SPIS-AA¹⁷-LYI, NDEGLEXVPTEE:SPIS-AA¹⁷-LYI, NDEGLEXVPTGQ:SPIS-AA¹⁷-LYI, SSVKXQPSRVHH:SPIS-AA¹⁷-LYI, RNVQXRPTQVQL:SPIS-AA¹⁷-LYI, KIPKAXXVPTEL:SPIS-AA¹⁷-LFI, GIPEPXXVPTKM:SPIS-AA¹⁷-LFI, SIPKAXXVPTEL:SPIS-AA¹⁷-LFI, HVTKPTXVPTKL:SPIS-AA¹⁷-LFI, YVPKPXXVPTKL:SPIS-AA¹⁷-LFI, TVPKPXXVPTQL:SPIS-AA¹⁷-LFI, AVPKAXXVPTKL:SPIS-AA¹⁷-LFI, KVGKAXXVPTKL:SPIS-AA¹⁷-LFI, KASKAXXVPTKL:SPIS-AA¹⁷-LFI, GSAGPXXVPTKM:SPIS-AA¹⁷-LFI, AAPASXXVPTRL:SPIS-AA¹⁷-LFI, HVPKPXXVPTKL:SPIS-AA¹⁷-LFI, RVPSTXXVPTKT:SPIS-AA¹⁷-LFI, ASAAPXXVPTAL:SPIS-AA¹⁷-LFI, ASASPXXVPTDL:SPIS-AA¹⁷-LFI, GIPEPXXVPEKM:SPIS-AA¹⁷-LFI, HVTKPTXAPTKL:SPIS-AA¹⁷-LFI, YVPKPXXAPTKL:SPIS-AA¹⁷-LFI, TVPKPXXAPTQL:SPIS-AA¹⁷-LFI, AVPKAXXAPTKL:SPIS-AA¹⁷-LFI, GSAGPXXTPTKM:SPIS-AA¹⁷-LFI, AAPASXXVPARL:SPIS-AA¹⁷-LFI, HVPKPXXAPTKL:SPIS-AA¹⁷-LFI, RVPSTXXAPVKT:SPIS-AA¹⁷-LFI, ASAAPXXVPQAL:SPIS-AA¹⁷-LFI, ASASPXXVSQDL:SPIS-AA¹⁷-LFI, ASASPXXVPQDL:SPIS-AA¹⁷-LFI, SSVKXQPSRVHH:SPIS-AA¹⁷-LFI, RNVQXRPTQVQL:SPIS-AA¹⁷-LFI, KIPKAXXAPVEL:KPLS-AA¹⁷-LYV, GIPEPXXAPVKM:KPLS-AA¹⁷-LYV, SIPKAXXAPVEL:KPLS-AA¹⁷-LYV, HVTKPTXAPVKL:KPLS-AA¹⁷-LYV, YVPKPXXAPVKL:KPLS-AA¹⁷-LYV, TVPKPXXAPVQL:KPLS-AA¹⁷-LYV, AVPKAXXAPVKL:KPLS-AA¹⁷-LYV, KVGKAXXAPVKL:KPLS-AA¹⁷-LYV, KASKAXXAPVKL:KPLS-AA¹⁷-LYV, GSAGPXXAPVKM:KPLS-AA¹⁷-LYV, AAPASXXAPVRL:KPLS-AA¹⁷-LYV, STPPTXXAPVRL:KPLS-AA¹⁷-LYV, HVPKPXXAPVKL:KPLS-AA¹⁷-LYV, ASAAPXXAPVAL:KPLS-AA¹⁷-LYV, ASASPXXAPVDL:KPLS-AA¹⁷-LYV, KIPKAXXVPTEL:KPLS-AA¹⁷-LYV, GIPEPXXVPEKM:KPLS-AA¹⁷-LYV, SIPKAXXVPTEL:KPLS-AA¹⁷-LYV, HVTKPTXAPTKL:KPLS-AA¹⁷-LYV, YVPKPXXAPTKL:KPLS-AA¹⁷-LYV, TVPKPXXAPTQL:KPLS-AA¹⁷-LYV, AVPKAXXAPTKL:KPLS-AA¹⁷-LYV, KVGKAXXVPTKL:KPLS-AA¹⁷-LYV, KASKAXXVPTKL:KPLS-AA¹⁷-LYV, GSAGPXXTPTKM:KPLS-AA¹⁷-LYV, AAPASXXVPARL:KPLS-AA¹⁷-LYV, STPPTXXVPTRL:KPLS-AA¹⁷-LYV, HVPKPXXAPTKL:KPLS-AA¹⁷-LYV, ASAAPXXVPQAL:KPLS-AA¹⁷-LYV, ASASPXXVSQDL:KPLS-AA¹⁷-LYV, ASASPXXVPQDL:KPLS-AA¹⁷-LYV, NDEGLEXVPTEE:KPLS-AA¹⁷-LYV, NDEGLEXVPTGQ:KPLS-AA¹⁷-LYV, SSVKXQPSRVHH:KPLS-AA¹⁷-LYV, RNVQXRPTQVQL:KPLS-AA¹⁷-LYV, KIPKAXXVPQEL:EPLP-AA¹⁷-VYY, GIPEPXXVPQKM:EPLP-AA¹⁷-VYY, SIPKAXXVPQEL:EPLP-AA¹⁷-VYY, HVTKPTXVPQKL:EPLP-AA¹⁷-VYY, YVPKPXXVPQKL:EPLP-AA¹⁷-VYY, TVPKPXXVPQQL:EPLP-AA¹⁷-VYY, AVPKAXXVPQKL:EPLP-AA¹⁷-VYY, KVGKAXXVPQKL:EPLP-AA¹⁷-VYY, KASKAXXVPQKL:EPLP-AA¹⁷-VYY, GSAGPXXVPQKM:EPLP-AA¹⁷-VYY, AAPASXXVPQRL:EPLP-AA¹⁷-VYY, STPPTXXVPQRL:EPLP-AA¹⁷-VYY, HVPKPXXVPQKL:EPLP-AA¹⁷-VYY, RVPSTXXVPQKT:EPLP-AA¹⁷-VYY, ASASPXXVPQDL:EPLP-AA¹⁷-VYY, KIPKAXXVPTEL:EPLP-AA¹⁷-VYY, GIPEPXXVPEKM:EPLP-AA¹⁷-VYY, SIPKAXXVPTEL:EPLP-AA¹⁷-VYY, HVTKPTXAPTKL:EPLP-AA¹⁷-VYY, YVPKPXXAPTKL:EPLP-AA¹⁷-VYY, TVPKPXXAPTQL:EPLP-AA¹⁷-VYY, AVPKAXXAPTKL:EPLP-AA¹⁷-VYY, KVGKAXXVPTKL:EPLP-AA¹⁷-VYY, KASKAXXVPTKL:EPLP-AA¹⁷-VYY, GSAGPXXTPTKM:EPLP-AA¹⁷-VYY, AAPASXXVPARL:EPLP-AA¹⁷-VYY, STPPTXXVPTRL:EPLP-AA¹⁷-VYY, HVPKPXXAPTKL:EPLP-AA¹⁷-VYY, RVPSTXXAPVKT:EPLP-AA¹⁷-VYY, ASASPXXVSQDL:EPLP-AA¹⁷-VYY, NDEGLEXVPTEE:EPLP-AA¹⁷-VYY, NDEGLEXVPTGQ:EPLP-AA¹⁷-VYY, SSVKXQPSRVHH:EPLP-AA¹⁷-VYY, RNVQXRPTQVQL:EPLP-AA¹⁷-VYY, KIPKAXXVSQEL:EPLT-AA¹⁷-LYY, GIPEPXXVSQKM:EPLT-AA¹⁷-LYY, SIPKAXXVSQEL:EPLT-AA¹⁷-LYY, HVTKPTXVSQKL:EPLT-AA¹⁷-LYY, YVPKPXXVSQKL:EPLT-AA¹⁷-LYY, TVPKPXXVSQQL:EPLT-AA¹⁷-LYY, AVPKAXXVSQKL:EPLT-AA¹⁷-LYY, KVGKAXXVSQKL:EPLT-AA¹⁷-LYY, KASKAXXVSQKL:EPLT-AA¹⁷-LYY, GSAGPXXVSQKM:EPLT-AA¹⁷-LYY, AAPASXXVSQRL:EPLT-AA¹⁷-LYY, STPPTXXVSQRL:EPLT-AA¹⁷-LYY, HVPKPXXVSQKL:EPLT-AA¹⁷-LYY, RVPSTXXVSQKT:EPLT-AA¹⁷-LYY, ASAAPXXVSQAL:EPLT-AA¹⁷-LYY, ASASPXXVSQDL:EPLT-AA¹⁷-LYY, KIPKAXXVPTEL:EPLT-AA¹⁷-LYY, GIPEPXXVPEKM:EPLT-AA¹⁷-LYY, SIPKAXXVPTEL:EPLT-AA¹⁷-LYY, HVTKPTXAPTKL:EPLT-AA¹⁷-LYY, YVPKPXXAPTKL:EPLT-AA¹⁷-LYY, TVPKPXXAPTQL:EPLT-AA¹⁷-LYY, AVPKAXXAPTKL:EPLT-AA¹⁷-LYY, KVGKAXXVPTKL:EPLT-AA¹⁷-LYY, KASKAXXVPTKL:EPLT-AA¹⁷-LYY, GSAGPXXTPTKM:EPLT-AA¹⁷-LYY, AAPASXXVPARL:EPLT-AA¹⁷-LYY, STPPTXXVPTRL:EPLT-AA¹⁷-LYY, HVPKPXXAPTKL:EPLT-AA¹⁷-LYY, RVPSTXXAPVKT:EPLT-AA¹⁷-LYY, ASAAPXXVPQAL:EPLT-AA¹⁷-LYY, NDEGLEXVPTEE:EPLT-AA¹⁷-LYY, NDEGLEXVPTGQ:EPLT-AA¹⁷-LYY, SSVKXQPSRVHH:EPLT-AA¹⁷-LYY, RNVQXRPTQVQL:EPLT-AA¹⁷-LYY, KIPKAXXVPQEL:EPLT-AA¹⁷-LYY, GIPEPXXVPQKM:EPLT-AA¹⁷-LYY, SIPKAXXVPQEL:EPLT-AA¹⁷-LYY, HVTKPTXVPQKL:EPLT-AA¹⁷-LYY, YVPKPXXVPQKL:EPLT-AA¹⁷-LYY, TVPKPXXVPQQL:EPLT-AA¹⁷-LYY, AVPKAXXVPQKL:EPLT-AA¹⁷-LYY, KVGKAXXVPQKL:EPLT-AA¹⁷-LYY, KASKAXXVPQKL:EPLT-AA¹⁷-LYY, GSAGPXXVPQKM:EPLT-AA¹⁷-LYY, AAPASXXVPQRL:EPLT-AA¹⁷-LYY, STPPTXXVPQRL:EPLT-AA¹⁷-LYY, HVPKPXXVPQKL:EPLT-AA¹⁷-LYY, RVPSTXXVPQKT:EPLT-AA¹⁷-LYY, ASASPXXVPQDL:EPLT-AA¹⁷-LYY, NDEGLEXVPTGQ:SNIT-AA¹⁷-QIM, GIPEPXXVPEKM:SNIT-AA¹⁷-QIM, HVTKPTXAPTKL:SNIT-AA¹⁷-QIM, YVPKPXXAPTKL:SNIT-AA¹⁷-QIM, TVPKPXXAPTQL:SNIT-AA¹⁷-QIM, AVPKAXXAPTKL:SNIT-AA¹⁷-QIM, GSAGPXXTPTKM:SNIT-AA¹⁷-QIM, AAPASXXVPARL:SNIT-AA¹⁷-QIM, HVPKPXXAPTKL:SNIT-AA¹⁷-QIM, RVPSTXXAPVKT:SNIT-AA¹⁷-QIM, ASAAPXXVPQAL:SNIT-AA¹⁷-QIM, ASASPXXVSQDL:SNIT-AA¹⁷-QIM, ASASPXXVPQDL:SNIT-AA¹⁷-QIM, SSVKXQPSRVHH:SNIT-AA¹⁷-QIM, RNVQXRPTQVQL:SNIT-AA¹⁷-QIM, RNVQXRPSRVQL:RSVK-AA¹⁷-AKV, KIPKAXXVPTEL:RSVK-AA¹⁷-AKV, GIPEPXXVPEKM:RSVK-AA¹⁷-AKV, SIPKAXXVPTEL:RSVK-AA¹⁷-AKV, HVTKPTXAPTKL:RSVK-AA¹⁷-AKV, YVPKPXXAPTKL:RSVK-AA¹⁷-AKV, TVPKPXXAPTQL:RSVK-AA¹⁷-AKV, AVPKAXXAPTKL:RSVK-AA¹⁷-AKV, KVGKAXXVPTKL:RSVK-AA¹⁷-AKV, KASKAXXVPTKL:RSVK-AA¹⁷-AKV, GSAGPXXTPTKM:RSVK-AA¹⁷-AKV, AAPASXXVPARL:RSVK-AA¹⁷-AKV, STPPTXXVPTRL:RSVK-AA¹⁷-AKV, HVPKPXXAPTKL:RSVK-AA¹⁷-AKV, RVPSTXXAPVKT:RSVK-AA¹⁷-AKV, ASAAPXXVPQAL:RSVK-AA¹⁷-AKV, ASASPXXVSQDL:RSVK-AA¹⁷-AKV, ASASPXXVPQDL:RSVK-AA¹⁷-AKV, NDEGLEXVPTEE:RSVK-AA¹⁷-AKV, NDEGLEXVPTGQ:RSVK-AA¹⁷-AKV, RNVQXRPTQVQL:RSVK-AA¹⁷-AKV, SSVKXQPTQVHH:RPVQ-AA¹⁷-RKI, KIPKAXXVPTEL:RPVQ-AA¹⁷-RKI, GIPEPXXVPEKM:RPVQ-AA¹⁷-RKI, SIPKAXXVPTEL:RPVQ-AA¹⁷-RKI, HVTKPTXAPTKL:RPVQ-AA¹⁷-RKI, YVPKPXXAPTKL:RPVQ-AA¹⁷-RKI, TVPKPXXAPTQL:RPVQ-AA¹⁷-RKI, AVPKAXXAPTKL:RPVQ-AA¹⁷-RKI, KVGKAXXVPTKL:RPVQ-AA¹⁷-RKI, KASKAXXVPTKL:RPVQ-AA¹⁷-RKI, GSAGPXXTPTKM:RPVQ-AA¹⁷-RKI, AAPASXXVPARL:RPVQ-AA¹⁷-RKI, STPPTXXVPTRL:RPVQ-AA¹⁷-RKI, HVPKPXXAPTKL:RPVQ-AA¹⁷-RKI, RVPSTXXAPVKT:RPVQ-AA¹⁷-RKI, ASAAPXXVPQAL:RPVQ-AA¹⁷-RKI, ASASPXXVSQDL:RPVQ-AA¹⁷-RKI, ASASPXXVPQDL:RPVQ-AA¹⁷-RKI, NDEGLEXVPTEE:RPVQ-AA¹⁷-RKI, NDEGLEXVPTGQ:RPVQ-AA¹⁷-RKI and SSVKXQPSRVHH:RPVQ-AA¹⁷-RKI; and wherein AA¹⁷ is selected from the group consisting of G, A, V, L, I, P, F, M, W, T and S (in particular is selected from the group consisting of M, I, L, V and T).

[0325] In certain embodiments, the triplet PEP7:PEP3:PEP1 is selected from the group consisting of GIPEPXX:VPT:SAIS, HVTKPTX:VPT:SAIS, YVPKPXX:VPT:SAIS, TVPKPXX:VPT:SAIS, AVPKAXX:VPT:SAIS, KVGKAXX:VPT:SAIS, KASKAXX:VPT:SAIS, GSAGPXX:VPT:SAIS, AAPASXX:VPT:SAIS, STPPTXX:VPT:SAIS, HVPKPXX:VPT:SAIS, RVPSTXX:VPT:SAIS, ASAAPXX:VPT:SAIS, ASASPXX:VPT:SAIS, GIPEPXX:VPE:SAIS, HVTKPTX:APT:SAIS, YVPKPXX:APT:SAIS, TVPKPXX:APT:SAIS, AVPKAXX:APT:SAIS, GSAGPXX:TPT:SAIS, AAPASXX:VPA:SAIS, HVPKPXX:APT:SAIS, RVPSTXX:APV:SAIS, ASAAPXX:VPQ:SAIS, ASASPXX:VSQ:SAIS, ASASPXX:VPQ:SAIS, SSVKXQP:SRV:SAIS, RNVQXRP:TQV:SAIS, KIPKAXX:VPE:SSLS, SIPKAXX:VPE:SSLS, HVTKPTX:VPE:SSLS, YVPKPXX:VPE:SSLS, TVPKPXX:VPE:SSLS, AVPKAXX:VPE:SSLS, KVGKAXX:VPE:SSLS, KASKAXX:VPE:SSLS, GSAGPXX:VPE:SSLS, AAPASXX:VPE:SSLS, STPPTXX:VPE:SSLS, HVPKPXX:VPE:SSLS, RVPSTXX:VPE:SSLS, ASAAPXX:VPE:SSLS, ASASPXX:VPE:SSLS, KIPKAXX:VPT:SSLS, SIPKAXX:VPT:SSLS, HVTKPTX:APT:SSLS, YVPKPXX:APT:SSLS, TVPKPXX:APT:SSLS, AVPKAXX:APT:SSLS, KVGKAXX:VPT:SSLS, KASKAXX:VPT:SSLS, GSAGPXX:TPT:SSLS, AAPASXX:VPA:SSLS, STPPTXX:VPT:SSLS, HVPKPXX:APT:SSLS, RVPSTXX:APV:SSLS, ASAAPXX:VPQ:SSLS, ASASPXX:VSQ:SSLS, ASASPXX:VPQ:SSLS, NDEGLEX:VPT:SSLS, SSVKXQP:SRV:SSLS, RNVQXRP:TQV:SSLS, KIPKAXX:APT:NAIS, GIPEPXX:APT:NAIS, SIPKAXX:APT:NAIS, AVPKAXX:APT:NAIS, KVGKAXX:APT:NAIS, KASKAXX:APT:NAIS, GSAGPXX:APT:NAIS, AAPASXX:APT:NAIS, STPPTXX:APT:NAIS, RVPSTXX:APT:NAIS, ASAAPXX:APT:NAIS, ASASPXX:APT:NAIS, KIPKAXX:VPT:NAIS, GIPEPXX:VPE:NAIS, SIPKAXX:VPT:NAIS, KVGKAXX:VPT:NAIS, KASKAXX:VPT:NAIS, GSAGPXX:TPT:NAIS, AAPASXX:VPA:NAIS, STPPTXX:VPT:NAIS, RVPSTXX:APV:NAIS, ASAAPXX:VPQ:NAIS, ASASPXX:VSQ:NAIS, ASASPXX:VPQ:NAIS, NDEGLEX:VPT:NAIS, SSVKXQP:SRV:NAIS, RNVQXRP:TQV:NAIS, KIPKAXX:APT:SATS, GIPEPXX:APT:SATS, SIPKAXX:APT:SATS, HVTKPTX:APT:SATS, YVPKPXX:APT:SATS, TVPKPXX:APT:SATS, KVGKAXX:APT:SATS, KASKAXX:APT:SATS, GSAGPXX:APT:SATS, AAPASXX:APT:SATS, STPPTXX:APT:SATS, HVPKPXX:APT:SATS, RVPSTXX:APT:SATS, ASAAPXX:APT:SATS, ASASPXX:APT:SATS, KIPKAXX:VPT:SATS, GIPEPXX:VPE:SATS, SIPKAXX:VPT:SATS, KVGKAXX:VPT:SATS, KASKAXX:VPT:SATS, GSAGPXX:TPT:SATS, AAPASXX:VPA:SATS, STPPTXX:VPT:SATS, RVPSTXX:APV:SATS, ASAAPXX:VPQ:SATS, ASASPXX:VSQ:SATS, ASASPXX:VPQ:SATS, NDEGLEX:VPT:SATS, SSVKXQP:SRV:SATS, RNVQXRP:TQV:SATS, KIPKAXX:VPT:SPIS, GIPEPXX:VPT:SPIS, SIPKAXX:VPT:SPIS, HVTKPTX:VPT:SPIS, YVPKPXX:VPT:SPIS, TVPKPXX:VPT:SPIS, AVPKAXX:VPT:SPIS, KASKAXX:VPT:SPIS, GSAGPXX:VPT:SPIS, AAPASXX:VPT:SPIS, STPPTXX:VPT:SPIS, HVPKPXX:VPT:SPIS, RVPSTXX:VPT:SPIS, ASAAPXX:VPT:SPIS, ASASPXX:VPT:SPIS, GIPEPXX:VPE:SPIS, HVTKPTX:APT:SPIS, YVPKPXX:APT:SPIS, TVPKPXX:APT:SPIS, AVPKAXX:APT:SPIS, GSAGPXX:TPT:SPIS, AAPASXX:VPA:SPIS, HVPKPXX:APT:SPIS, RVPSTXX:APV:SPIS, ASAAPXX:VPQ:SPIS, ASASPXX:VSQ:SPIS, ASASPXX:VPQ:SPIS, SSVKXQP:SRV:SPIS, RNVQXRP:TQV:SPIS, KIPKAXX:VPT:EPIS, GIPEPXX:VPT:EPIS, SIPKAXX:VPT:EPIS, HVTKPTX:VPT:EPIS, YVPKPXX:VPT:EPIS, TVPKPXX:VPT:EPIS, AVPKAXX:VPT:EPIS, KVGKAXX:VPT:EPIS, GSAGPXX:VPT:EPIS, AAPASXX:VPT:EPIS, STPPTXX:VPT:EPIS, HVPKPXX:VPT:EPIS, RVPSTXX:VPT:EPIS, ASAAPXX:VPT:EPIS, ASASPXX:VPT:EPIS, GIPEPXX:VPE:EPIS, HVTKPTX:APT:EPIS, YVPKPXX:APT:EPIS, TVPKPXX:APT:EPIS, AVPKAXX:APT:EPIS, GSAGPXX:TPT:EPIS, AAPASXX:VPA:EPIS, HVPKPXX:APT:EPIS, RVPSTXX:APV:EPIS, ASAAPXX:VPQ:EPIS, ASASPXX:VSQ:EPIS, ASASPXX:VPQ:EPIS, SSVKXQP:SRV:EPIS, RNVQXRP:TQV:EPIS, KIPKAXX:TPT:SPIN, GIPEPXX:TPT:SPIN, SIPKAXX:TPT:SPIN, HVTKPTX:TPT:SPIN, YVPKPXX:TPT:SPIN, TVPKPXX:TPT:SPIN, AVPKAXX:TPT:SPIN, KVGKAXX:TPT:SPIN, KASKAXX:TPT:SPIN, AAPASXX:TPT:SPIN, STPPTXX:TPT:SPIN, HVPKPXX:TPT:SPIN, RVPSTXX:TPT:SPIN, ASAAPXX:TPT:SPIN, ASASPXX:TPT:SPIN, KIPKAXX:VPT:SPIN, GIPEPXX:VPE:SPIN, SIPKAXX:VPT:SPIN, HVTKPTX:APT:SPIN, YVPKPXX:APT:SPIN, TVPKPXX:APT:SPIN, AVPKAXX:APT:SPIN, KVGKAXX:VPT:SPIN, KASKAXX:VPT:SPIN, AAPASXX:VPA:SPIN, STPPTXX:VPT:SPIN, HVPKPXX:APT:SPIN, RVPSTXX:APV:SPIN, ASAAPXX:VPQ:SPIN, ASASPXX:VSQ:SPIN, ASASPXX:VPQ:SPIN, NDEGLEX:VPT:SPIN, SSVKXQP:SRV:SPIN, RNVQXRP:TQV:SPIN, KIPKAXX:VPA:SPIS, GIPEPXX:VPA:SPIS, SIPKAXX:VPA:SPIS, HVTKPTX:VPA:SPIS, YVPKPXX:VPA:SPIS, TVPKPXX:VPA:SPIS, AVPKAXX:VPA:SPIS, KVGKAXX:VPA:SPIS, KASKAXX:VPA:SPIS, GSAGPXX:VPA:SPIS, STPPTXX:VPA:SPIS, HVPKPXX:VPA:SPIS, RVPSTXX:VPA:SPIS, ASAAPXX:VPA:SPIS, ASASPXX:VPA:SPIS, KVGKAXX:VPT:SPIS, NDEGLEX:VPT:SPIS, KIPKAXX:APV:KPLS, GIPEPXX:APV:KPLS, SIPKAXX:APV:KPLS, HVTKPTX:APV:KPLS, YVPKPXX:APV:KPLS, TVPKPXX:APV:KPLS, AVPKAXX:APV:KPLS, KVGKAXX:APV:KPLS, KASKAXX:APV:KPLS, GSAGPXX:APV:KPLS, AAPASXX:APV:KPLS, STPPTXX:APV:KPLS, HVPKPXX:APV:KPLS, ASAAPXX:APV:KPLS, ASASPXX:APV:KPLS, KIPKAXX:VPT:KPLS, GIPEPXX:VPE:KPLS, SIPKAXX:VPT:KPLS, HVTKPTX:APT:KPLS, YVPKPXX:APT:KPLS, TVPKPXX:APT:KPLS, AVPKAXX:APT:KPLS, KVGKAXX:VPT:KPLS, KASKAXX:VPT:KPLS, GSAGPXX:TPT:KPLS, AAPASXX:VPA:KPLS, STPPTXX:VPT:KPLS, HVPKPXX:APT:KPLS, ASAAPXX:VPQ:KPLS, ASASPXX:VSQ:KPLS, ASASPXX:VPQ:KPLS, NDEGLEX:VPT:KPLS, SSVKXQP:SRV:KPLS, RNVQXRP:TQV:KPLS, KIPKAXX:VPQ:EPLP, GIPEPXX:VPQ:EPLP, SIPKAXX:VPQ:EPLP, HVTKPTX:VPQ:EPLP, YVPKPXX:VPQ:EPLP, TVPKPXX:VPQ:EPLP, AVPKAXX:VPQ:EPLP, KVGKAXX:VPQ:EPLP, KASKAXX:VPQ:EPLP, GSAGPXX:VPQ:EPLP, AAPASXX:VPQ:EPLP, STPPTXX:VPQ:EPLP, HVPKPXX:VPQ:EPLP, RVPSTXX:VPQ:EPLP, ASASPXX:VPQ:EPLP, KIPKAXX:VPT:EPLP, GIPEPXX:VPE:EPLP, SIPKAXX:VPT:EPLP, HVTKPTX:APT:EPLP, YVPKPXX:APT:EPLP, TVPKPXX:APT:EPLP, AVPKAXX:APT:EPLP, KVGKAXX:VPT:EPLP, KASKAXX:VPT:EPLP, GSAGPXX:TPT:EPLP, AAPASXX:VPA:EPLP, STPPTXX:VPT:EPLP, HVPKPXX:APT:EPLP, RVPSTXX:APV:EPLP, ASASPXX:VSQ:EPLP, NDEGLEX:VPT:EPLP, SSVKXQP:SRV:EPLP, RNVQXRP:TQV:EPLP, KIPKAXX:VSQ:EPLT, GIPEPXX:VSQ:EPLT, SIPKAXX:VSQ:EPLT, HVTKPTX:VSQ:EPLT, YVPKPXX:VSQ:EPLT, TVPKPXX:VSQ:EPLT, AVPKAXX:VSQ:EPLT, KVGKAXX:VSQ:EPLT, KASKAXX:VSQ:EPLT, GSAGPXX:VSQ:EPLT, AAPASXX:VSQ:EPLT, STPPTXX:VSQ:EPLT, HVPKPXX:VSQ:EPLT, RVPSTXX:VSQ:EPLT, ASAAPXX:VSQ:EPLT, ASASPXX:VSQ:EPLT, KIPKAXX:VPT:EPLT, GIPEPXX:VPE:EPLT, SIPKAXX:VPT:EPLT, HVTKPTX:APT:EPLT, YVPKPXX:APT:EPLT, TVPKPXX:APT:EPLT, AVPKAXX:APT:EPLT, KVGKAXX:VPT:EPLT, KASKAXX:VPT:EPLT, GSAGPXX:TPT:EPLT, AAPASXX:VPA:EPLT, STPPTXX:VPT:EPLT, HVPKPXX:APT:EPLT, RVPSTXX:APV:EPLT, ASAAPXX:VPQ:EPLT, NDEGLEX:VPT:EPLT, SSVKXQP:SRV:EPLT, RNVQXRP:TQV:EPLT, KIPKAXX:VPQ:EPLT, GIPEPXX:VPQ:EPLT, SIPKAXX:VPQ:EPLT, HVTKPTX:VPQ:EPLT, YVPKPXX:VPQ:EPLT, TVPKPXX:VPQ:EPLT, AVPKAXX:VPQ:EPLT, KVGKAXX:VPQ:EPLT, KASKAXX:VPQ:EPLT, GSAGPXX:VPQ:EPLT, AAPASXX:VPQ:EPLT, STPPTXX:VPQ:EPLT, HVPKPXX:VPQ:EPLT, RVPSTXX:VPQ:EPLT, ASASPXX:VPQ:EPLT, NDEGLEX:VPT:SNIT, GIPEPXX:VPE:SNIT, HVTKPTX:APT:SNIT, YVPKPXX:APT:SNIT, TVPKPXX:APT:SNIT, AVPKAXX:APT:SNIT, GSAGPXX:TPT:SNIT, AAPASXX:VPA:SNIT, HVPKPXX:APT:SNIT, RVPSTXX:APV:SNIT, ASAAPXX:VPQ:SNIT, ASASPXX:VSQ:SNIT, ASASPXX:VPQ:SNIT, SSVKXQP:SRV:SNIT, RNVQXRP:TQV:SNIT, RNVQXRP:SRV:RSVK, KIPKAXX:VPT:RSVK, GIPEPXX:VPE:RSVK, SIPKAXX:VPT:RSVK, HVTKPTX:APT:RSVK, YVPKPXX:APT:RSVK, TVPKPXX:APT:RSVK, AVPKAXX:APT:RSVK, KVGKAXX:VPT:RSVK, KASKAXX:VPT:RSVK, GSAGPXX:TPT:RSVK, AAPASXX:VPA:RSVK, STPPTXX:VPT:RSVK, HVPKPXX:APT:RSVK, RVPSTXX:APV:RSVK, ASAAPXX:VPQ:RSVK, ASASPXX:VSQ:RSVK, ASASPXX:VPQ:RSVK, NDEGLEX:VPT:RSVK, RNVQXRP:TQV:RSVK, SSVKXQP:TQV:RPVQ, KIPKAXX:VPT:RPVQ, GIPEPXX:VPE:RPVQ, SIPKAXX:VPT:RPVQ, HVTKPTX:APT:RPVQ, YVPKPXX:APT:RPVQ, TVPKPXX:APT:RPVQ, AVPKAXX:APT:RPVQ, KVGKAXX:VPT:RPVQ, KASKAXX:VPT:RPVQ, GSAGPXX:TPT:RPVQ, AAPASXX:VPA:RPVQ, STPPTXX:VPT:RPVQ, HVPKPXX:APT:RPVQ, RVPSTXX:APV:RPVQ, ASAAPXX:VPQ:RPVQ, ASASPXX:VSQ:RPVQ, ASASPXX:VPQ:RPVQ, NDEGLEX:VPT:RPVQ and SSVKXQP:SRV:RPVQ.

[0326] In certain embodiments, the triplet PEP7:PEP3:PEP12 is selected from the group consisting of GIPEPXX:VPT:SAIS-AA¹⁷-LYL, HVTKPTX:VPT:SAIS-AA¹⁷-LYL, YVPKPXX:VPT:SAIS-AA¹⁷-LYL, TVPKPXX:VPT:SAIS-AA¹⁷-LYL, AVPKAXX:VPT:SAIS-AA¹⁷-LYL, KVGKAXX:VPT:SAIS-AA¹⁷-LYL, KASKAXX:VPT:SAIS-AA¹⁷-LYL, GSAGPXX:VPT:SAIS-AA¹⁷-LYL, AAPASXX:VPT:SAIS-AA¹⁷-LYL, STPPTXX:VPT:SAIS-AA¹⁷-LYL, HVPKPXX:VPT:SAIS-AA¹⁷-LYL, RVPSTXX:VPT:SAIS-AA¹⁷-LYL, ASAAPXX:VPT:SAIS-AA¹⁷-LYL, ASASPXX:VPT:SAIS-AA¹⁷-LYL, GIPEPXX:VPE:SAIS-AA¹⁷-LYL, HVTKPTX:APT:SAIS-AA¹⁷-LYL, YVPKPXX:APT:SAIS-AA¹⁷-LYL, TVPKPXX:APT:SAIS-AA¹⁷-LYL, AVPKAXX:APT:SAIS-AA¹⁷-LYL, GSAGPXX:TPT:SAIS-AA¹⁷-LYL, AAPASXX:VPA:SAIS-AA¹⁷-LYL, HVPKPXX:APT:SAIS-AA¹⁷-LYL, RVPSTXX:APV:SAIS-AA¹⁷-LYL, ASAAPXX:VPQ:SAIS-AA¹⁷-LYL, ASASPXX:VSQ:SAIS-AA¹⁷-LYL, ASASPXX:VPQ:SAIS-AA¹⁷-LYL, SSVKXQP:SRV:SAIS-AA¹⁷-LYL, RNVQXRP:TQV:SAIS-AA¹⁷-LYL, KIPKAXX:VPE:SSLS-AA¹⁷-LFF, SIPKAXX:VPE:SSLS-AA¹⁷-LFF, HVTKPTX:VPE:SSLS-AA¹⁷-LFF, YVPKPXX:VPE:SSLS-AA¹⁷-LFF, TVPKPXX:VPE:SSLS-AA¹⁷-LFF, AVPKAXX:VPE:SSLS-AA¹⁷-LFF, KVGKAXX:VPE:SSLS-AA¹⁷-LFF, KASKAXX:VPE:SSLS-AA¹⁷-LFF, GSAGPXX:VPE:SSLS-AA¹⁷-LFF, AAPASXX:VPE:SSLS-AA¹⁷-LFF, STPPTXX:VPE:SSLS-AA¹⁷-LFF, HVPKPXX:VPE:SSLS-AA¹⁷-LFF, RVPSTXX:VPE:SSLS-AA¹⁷-LFF, ASAAPXX:VPE:SSLS-AA¹⁷-LFF, ASASPXX:VPE:SSLS-AA¹⁷-LFF, KIPKAXX:VPT:SSLS-AA¹⁷-LFF, SIPKAXX:VPT:SSLS-AA¹⁷-LFF, HVTKPTX:APT:SSLS-AA¹⁷-LFF, YVPKPXX:APT:SSLS-AA¹⁷-LFF, TVPKPXX:APT:SSLS-AA¹⁷-LFF, AVPKAXX:APT:SSLS-AA¹⁷-LFF, KVGKAXX:VPT:SSLS-AA¹⁷-LFF, KASKAXX:VPT:SSLS-AA¹⁷-LFF, GSAGPXX:TPT:SSLS-AA¹⁷-LFF, AAPASXX:VPA:SSLS-AA¹⁷-LFF, STPPTXX:VPT:SSLS-AA¹⁷-LFF, HVPKPXX:APT:SSLS-AA¹⁷-LFF, RVPSTXX:APV:SSLS-AA¹⁷-LFF, ASAAPXX:VPQ:SSLS-AA¹⁷-LFF, ASASPXX:VSQ:SSLS-AA¹⁷-LFF, ASASPXX:VPQ:SSLS-AA¹⁷-LFF, NDEGLEX:VPT:SSLS-AA¹⁷-LFF, SSVKXQP:SRV:SSLS-AA¹⁷-LFF, RNVQXRP:TQV:SSLS-AA¹⁷-LFF, KIPKAXX:APT:NAIS-AA¹⁷-LYF, GIPEPXX:APT:NAIS-AA¹⁷-LYF, SIPKAXX:APT:NAIS-AA¹⁷-LYF, AVPKAXX:APT:NAIS-AA¹⁷-LYF, KVGKAXX:APT:NAIS-AA¹⁷-LYF, KASKAXX:APT:NAIS-AA¹⁷-LYF, GSAGPXX:APT:NAIS-AA¹⁷-LYF, AAPASXX:APT:NAIS-AA¹⁷-LYF, STPPTXX:APT:NAIS-AA¹⁷-LYF, RVPSTXX:APT:NAIS-AA¹⁷-LYF, ASAAPXX:APT:NAIS-AA¹⁷-LYF, ASASPXX:APT:NAIS-AA¹⁷-LYF, KIPKAXX:VPT:NAIS-AA¹⁷-LYF, GIPEPXX:VPE:NAIS-AA¹⁷-LYF, SIPKAXX:VPT:NAIS-AA¹⁷-LYF, KVGKAXX:VPT:NAIS-AA¹⁷-LYF, KASKAXX:VPT:NAIS-AA¹⁷-LYF, GSAGPXX:TPT:NAIS-AA¹⁷-LYF, AAPASXX:VPA:NAIS-AA¹⁷-LYF, STPPTXX:VPT:NAIS-AA¹⁷-LYF, RVPSTXX:APV:NAIS-AA¹⁷-LYF, ASAAPXX:VPQ:NAIS-AA¹⁷-LYF, ASASPXX:VSQ:NAIS-AA¹⁷-LYF, ASASPXX:VPQ:NAIS-AA¹⁷-LYF, NDEGLEX:VPT:NAIS-AA¹⁷-LYF, SSVKXQP:SRV:NAIS-AA¹⁷-LYF, RNVQXRP:TQV:NAIS-AA¹⁷-LYF, KIPKAXX:APT:SATS-AA¹⁷-LYY, GIPEPXX:APT:SATS-AA¹⁷-LYY, SIPKAXX:APT:SATS-AA¹⁷-LYY, HVTKPTX:APT:SATS-AA¹⁷-LYY, YVPKPXX:APT:SATS-AA¹⁷-LYY, TVPKPXX:APT:SATS-AA¹⁷-LYY, KVGKAXX:APT:SATS-AA¹⁷-LYY, KASKAXX:APT:SATS-AA¹⁷-LYY, GSAGPXX:APT:SATS-AA¹⁷-LYY, AAPASXX:APT:SATS-AA¹⁷-LYY, STPPTXX:APT:SATS-AA¹⁷-LYY, HVPKPXX:APT:SATS-AA¹⁷-LYY, RVPSTXX:APT:SATS-AA¹⁷-LYY, ASAAPXX:APT:SATS-AA¹⁷-LYY, ASASAPXX:APT:SATS-AA¹⁷-LYY, KIPKAXX:VPT:SATS-AA¹⁷-LYY, GIPEPXX:VPE:SATS-AA¹⁷-LYY, SIPKAXX:VPT:SATS-AA¹⁷-LYY, KVGKAXX:VPT:SATS-AA¹⁷-LYY, KASKAXX:VPT:SATS-AA¹⁷-LYY, GSAGPXX:TPT:SATS-AA¹⁷-LYY, AAPASXX:VPA:SATS-AA¹⁷-LYY, STPPTXX:VPT:SATS-AA¹⁷-LYY, RVPSTXX:APV:SATS-AA¹⁷-LYY, ASAAPXX:VPQ:SATS-AA¹⁷-LYY, ASASPXX:VSQ:SATS-AA¹⁷-LYY, ASASPXX:VPQ:SATS-AA¹⁷-LYY, NDEGLEX:VPT:SATS-AA¹⁷-LYY, SSVKXQP:SRV:SATS-AA¹⁷-LYY, RNVQXRP:TQV:SATS-AA¹⁷-LYY, KIPKAXX:VPT:SPIS-AA¹⁷-LYK, GIPEPXX:VPT:SPIS-AA¹⁷-LYK, SIPKAXX:VPT:SPIS-AA¹⁷-LYK, HVTKPTX:VPT:SPIS-AA¹⁷-LYK, YVPKPXX:VPT:SPIS-AA¹⁷-LYK, TVPKPXX:VPT:SPIS-AA¹⁷-LYK, AVPKAXX:VPT:SPIS-AA¹⁷-LYK, KASKAXX:VPT:SPIS-AA¹⁷-LYK, GSAGPXX:VPT:SPIS-AA¹⁷-LYK, AAPASXX:VPT:SPIS-AA¹⁷-LYK, STPPTXX:VPT:SPIS-AA¹⁷-LYK, HVPKPXX:VPT:SPIS-AA¹⁷-LYK, RVPSTXX:VPT:SPIS-AA¹⁷-LYK, ASAAPXX:VPT:SPIS-AA¹⁷-LYK, ASASPXX:VPT:SPIS-AA¹⁷-LYK, GIPEPXX:VPE:SPIS-AA¹⁷-LYK, HVTKPTX:APT:SPIS-AA¹⁷-LYK, YVPKPXX:APT:SPIS-AA¹⁷-LYK, TVPKPXX:APT:SPIS-AA¹⁷-LYK, AVPKAXX:APT:SPIS-AA¹⁷-LYK, GSAGPXX:TPT:SPIS-AA¹⁷-LYK, AAPASXX:VPA:SPIS-AA¹⁷-LYK, HVPKPXX:APT:SPIS-AA¹⁷-LYK, RVPSTXX:APV:SPIS-AA¹⁷-LYK, ASAAPXX:VPQ:SPIS-AA¹⁷-LYK, ASASPXX:VSQ:SPIS-AA¹⁷-LYK, ASASPXX:VPQ:SPIS-AA¹⁷-LYK, SSVKXQP:SRV:SPIS-AA¹⁷-LYK, RNVQXRP:TQV:SPIS-AA¹⁷-LYK, KIPKAXX:VPT:EPIS-AA¹⁷-LYL, GIPEPXX:VPT:EPIS-AA¹⁷-LYL, SIPKAXX:VPT:EPIS-AA¹⁷-LYL, HVTKPTX:VPT:EPIS-AA¹⁷-LYL, YVPKPXX:VPT:EPIS-AA¹⁷-LYL, TVPKPXX:VPT:EPIS-AA¹⁷-LYL, AVPKAXX:VPT:EPIS-AA¹⁷-LYL, KVGKAXX:VPT:EPIS-AA¹⁷-LYL, GSAGPXX:VPT:EPIS-AA¹⁷-LYL, AAPASXX:VPT:EPIS-AA¹⁷-LYL, STPPTXX:VPT:EPIS-AA¹⁷-LYL, HVPKPXX:VPT:EPIS-AA¹⁷-LYL, RVPSTXX:VPT:EPIS-AA¹⁷-LYL, ASAAPXX:VPT:EPIS-AA¹⁷-LYL, ASASPXX:VPT:EPIS-AA¹⁷-LYL, GIPEPXX:VPE:EPIS-AA¹⁷-LYL, HVTKPTX:APT:EPIS-AA¹⁷-LYL, YVPKPXX:APT:EPIS-AA¹⁷-LYL, TVPKPXX:APT:EPIS-AA¹⁷-LYL, AVPKAXX:APT:EPIS-AA¹⁷-LYL, GSAGPXX:TPT:EPIS-AA¹⁷-LYL, AAPASXX:VPA:EPIS-AA¹⁷-LYL, HVPKPXX:APT:EPIS-AA¹⁷-LYL, RVPSTXX:APV:EPIS-AA¹⁷-LYL, ASAAPXX:VPQ:EPIS-AA¹⁷-LYL, ASASPXX:VSQ:EPIS-AA¹⁷-LYL, ASASPXX:VPQ:EPIS-AA¹⁷-LYL, SSVKXQP:SRV:EPIS-AA¹⁷-LYL, RNVQXRP:TQV:EPIS-AA¹⁷-LYL, KIPKAXX:TPT:SPIN-AA¹⁷-LYF, GIPEPXX:TPT:SPIN-AA¹⁷-LYF, SIPKAXX:TPT:SPIN-AA¹⁷-LYF, HVTKPTX:TPT:SPIN-AA¹⁷-LYF, YVPKPXX:TPT:SPIN-AA¹⁷-LYF, TVPKPXX:TPT:SPIN-AA¹⁷-LYF, AVPKAXX:TPT:SPIN-AA¹⁷-LYF, KVGKAXX:TPT:SPIN-AA¹⁷-LYF, KASKAXX:TPT:SPIN-AA¹⁷-LYF, AAPASXX:TPT:SPIN-AA¹⁷-LYF, STPPTXX:TPT:SPIN-AA¹⁷-LYF, HVPKPXX:TPT:SPIN-AA¹⁷-LYF, RVPSTXX:TPT:SPIN-AA¹⁷-LYF, ASAAPXX:TPT:SPIN-AA¹⁷-LYF, ASASPXX:TPT:SPIN-AA¹⁷-LYF, KIPKAXX:VPT:SPIN-AA¹⁷-LYF, GIPEPXX:VPE:SPIN-AA¹⁷-LYF, SIPKAXX:VPT:SPIN-AA¹⁷-LYF, HVTKPTX:APT:SPIN-AA¹⁷-LYF, YVPKPXX:APT:SPIN-AA¹⁷-LYF, TVPKPXX:APT:SPIN-AA¹⁷-LYF, AVPKAXX:APT:SPIN-AA¹⁷-LYF, KVGKAXX:VPT:SPIN-AA¹⁷-LYF, KASKAXX:VPT:SPIN-AA¹⁷-LYF, AAPASXX:VPA:SPIN-AA¹⁷-LYF, STPPTXX:VPT:SPIN-AA¹⁷-LYF, HVPKPXX:APT:SPIN-AA¹⁷-LYF, RVPSTXX:APV:SPIN-AA¹⁷-LYF, ASAAPXX:VPQ:SPIN-AA¹⁷-LYF, ASASPXX:VSQ:SPIN-AA¹⁷-LYF, ASASPXX:VPQ:SPIN-AA¹⁷-LYF, NDEGLEX:VPT:SPIN-AA¹⁷-LYF, SSVKXQP:SRV:SPIN-AA¹⁷-LYF, RNVQXRP:TQV:SPIN-AA¹⁷-LYF, KIPKAXX:VPA:SPIS-AA¹⁷-LYI, GIPEPXX:VPA:SPIS-AA¹⁷-LYI, SIPKAXX:VPA:SPIS-AA¹⁷-LYI, HVTKPTX:VPA:SPIS-AA¹⁷-LYI, YVPKPXX:VPA:SPIS-AA¹⁷-LYI, TVPKPXX:VPA:SPIS-AA¹⁷-LYI, AVPKAXX:VPA:SPIS-AA¹⁷-LYI, KVGKAXX:VPA:SPIS-AA¹⁷-LYI, KASKAXX:VPA:SPIS-AA¹⁷-LYI, GSAGPXX:VPA:SPIS-AA¹⁷-LYI, STPPTXX:VPA:SPIS-AA¹⁷-LYI, HVPKPXX:VPA:SPIS-AA¹⁷-LYI, RVPSTXX:VPA:SPIS-AA¹⁷-LYI, ASAAPXX:VPA:SPIS-AA¹⁷-LYI, ASASPXX:VPA:SPIS-AA¹⁷-LYI, KIPKAXX:VPT:SPIS-AA¹⁷-LYI, GIPEPXX:VPE:SPIS-AA¹⁷-LYI, SIPKAXX:VPT:SPIS-AA¹⁷-LYI, HVTKPTX:APT:SPIS-AA¹⁷-LYI, YVPKPXX:APT:SPIS-AA¹⁷-LYI, TVPKPXX:APT:SPIS-AA¹⁷-LYI, AVPKAXX:APT:SPIS-AA¹⁷-LYI, KVGKAXX:VPT:SPIS-AA¹⁷-LYI, KASKAXX:VPT:SPIS-AA¹⁷-LYI, GSAGPXX:TPT:SPIS-AA¹⁷-LYI, STPPTXX:VPT:SPIS-AA¹⁷-LYI, HVPKPXX:APT:SPIS-AA¹⁷-LYI, RVPSTXX:APV:SPIS-AA¹⁷-LYI, ASAAPXX:VPQ:SPIS-AA¹⁷-LYI, ASASPXX:VSQ:SPIS-AA¹⁷-LYI, ASASPXX:VPQ:SPIS-AA¹⁷-LYI, NDEGLEX:VPT:SPIS-AA¹⁷-LYI, SSVKXQP:SRV:SPIS-AA¹⁷-LYI, RNVQXRP:TQV:SPIS-AA¹⁷-LYI, KIPKAXX:VPT:SPIS-AA¹⁷-LFI, GIPEPXX:VPT:SPIS-AA¹⁷-LFI, SIPKAXX:VPT:SPIS-AA¹⁷-LFI, HVTKPTX:VPT:SPIS-AA¹⁷-LFI, YVPKPXX:VPT:SPIS-AA¹⁷-LFI, TVPKPXX:VPT:SPIS-AA¹⁷-LFI, AVPKAXX:VPT:SPIS-AA¹⁷-LFI, KVGKAXX:VPT:SPIS-AA¹⁷-LFI, KASKAXX:VPT:SPIS-AA¹⁷-LFI, GSAGPXX:VPT:SPIS-AA¹⁷-LFI, AAPASXX:VPT:SPIS-AA¹⁷-LFI, HVPKPXX:VPT:SPIS-AA¹⁷-LFI, RVPSTXX:VPT:SPIS-AA¹⁷-LFI, ASAAPXX:VPT:SPIS-AA¹⁷-LFI, ASASPXX:VPT:SPIS-AA¹⁷-LFI, GIPEPXX:VPE:SPIS-AA¹⁷-LFI, HVTKPTX:APT:SPIS-AA¹⁷-LFI, YVPKPXX:APT:SPIS-AA¹⁷-LFI, TVPKPXX:APT:SPIS-AA¹⁷-LFI, AVPKAXX:APT:SPIS-AA¹⁷-LFI, GSAGPXX:TPT:SPIS-AA¹⁷-LFI, AAPASXX:VPA:SPIS-AA¹⁷-LFI, HVPKPXX:APT:SPIS-AA¹⁷-LFI, RVPSTXX:APV:SPIS-AA¹⁷-LFI, ASAAPXX:VPQ:SPIS-AA¹⁷-LFI, ASASPXX:VSQ:SPIS-AA¹⁷-LFI, ASASPXX:VPQ:SPIS-AA¹⁷-LFI, SSVKXQP:SRV:SPIS-AA¹⁷-LFI, RNVQXRP:TQV:SPIS-AA¹⁷-LFI, KIPKAXX:APV:KPLS-AA¹⁷-LYV, GIPEPXX:APV:KPLS-AA¹⁷-LYV, SIPKAXX:APV:KPLS-AA¹⁷-LYV, HVTKPTX:APV:KPLS-AA¹⁷-LYV, YVPKPXX:APV:KPLS-AA¹⁷-LYV, TVPKPXX:APV:KPLS-AA¹⁷-LYV, AVPKAXX:APV:KPLS-AA¹⁷-LYV, KVGKAXX:APV:KPLS-AA¹⁷-LYV, KASKAXX:APV:KPLS-AA¹⁷-LYV, GSAGPXX:APV:KPLS-AA¹⁷-LYV, AAPASXX:APV:KPLS-AA¹⁷-LYV, STPPTXX:APV:KPLS-AA¹⁷-LYV, HVPKPXX:APV:KPLS-AA¹⁷-LYV, ASAAPXX:APV:KPLS-AA¹⁷-LYV, ASASPXX:APV:KPLS-AA¹⁷-LYV, KIPKAXX:VPT:KPLS-AA¹⁷-LYV, GIPEPXX:VPE:KPLS-AA¹⁷-LYV, SIPKAXX:VPT:KPLS-AA¹⁷-LYV, HVTKPTX:APT:KPLS-AA¹⁷-LYV, YVPKPXX:APT:KPLS-AA¹⁷-LYV, TVPKPXX:APT:KPLS-AA¹⁷-LYV, AVPKAXX:APT:KPLS-AA¹⁷-LYV, KVGKAXX:VPT:KPLS-AA¹⁷-LYV, KASKAXX:VPT:KPLS-AA¹⁷-LYV, GSAGPXX:TPT:KPLS-AA¹⁷-LYV, AAPASXX:VPA:KPLS-AA¹⁷-LYV, STPPTXX:VPT:KPLS-AA¹⁷-LYV, HVPKPXX:APT:KPLS-AA¹⁷-LYV, ASAAPXX:VPQ:KPLS-AA¹⁷-LYV, ASASPXX:VSQ:KPLS-AA¹⁷-LYV, ASASPXX:VPQ:KPLS-AA¹⁷-LYV, NDEGLEX:VPT:KPLS-AA¹⁷-LYV, SSVKXQP:SRV:KPLS-AA¹⁷-LYV, RNVQXRP:TQV:KPLS-AA¹⁷-LYV, KIPKAXX:VPQ:EPLP-AA¹⁷-VYY, GIPEPXX:VPQ:EPLP-AA¹⁷-VYY, SIPKAXX:VPQ:EPLP-AA¹⁷-VYY, HVTKPTX:VPQ:EPLP-AA¹⁷-VYY, YVPKPXX:VPQ:EPLP-AA¹⁷-VYY, TVPKPXX:VPQ:EPLP-AA¹⁷-VYY, AVPKAXX:VPQ:EPLP-AA¹⁷-VYY, KVGKAXX:VPQ:EPLP-AA¹⁷-VYY, KASKAXX:VPQ:EPLP-AA¹⁷-VYY, GSAGPXX:VPQ:EPLP-AA¹⁷-VYY, AAPASXX:VPQ:EPLP-AA¹⁷-VYY, STPPTXX:VPQ:EPLP-AA¹⁷-VYY, HVPKPXX:VPQ:EPLP-AA¹⁷-VYY, RVPSTXX:VPQ:EPLP-AA¹⁷-VYY, ASASPXX:VPQ:EPLP-AA¹⁷-VYY, KIPKAXX:VPT:EPLP-AA¹⁷-VYY, GIPEPXX:VPE:EPLP-AA¹⁷-VYY, SIPKAXX:VPT:EPLP-AA¹⁷-VYY, HVTKPTX:APT:EPLP-AA¹⁷-VYY, YVPKPXX:APT:EPLP-AA¹⁷-VYY, TVPKPXX:APT:EPLP-AA¹⁷-VYY, AVPKAXX:APT:EPLP-AA¹⁷-VYY, KVGKAXX:VPT:EPLP-AA¹⁷-VYY, KASKAXX:VPT:EPLP-AA¹⁷-VYY, GSAGPXX:TPT:EPLP-AA¹⁷-VYY, AAPASXX:VPA:EPLP-AA¹⁷-VYY, STPPTXX:VPT:EPLP-AA¹⁷-VYY, HVPKPXX:APT:EPLP-AA¹⁷-VYY, RVPSTXX:APV:EPLP-AA¹⁷-VYY, ASASPXX:VSQ:EPLP-AA¹⁷-VYY, NDEGLEX:VPT:EPLP-AA¹⁷-VYY, SSVKXQP:SRV:EPLP-AA¹⁷-VYY, RNVQXRP:TQV:EPLP-AA¹⁷-VYY, KIPKAXX:VSQ:EPLT-AA¹⁷-LYY, GIPEPXX:VSQ:EPLT-AA¹⁷-LYY, SIPKAXX:VSQ:EPLT-AA¹⁷-LYY, HVTKPTX:VSQ:EPLT-AA¹⁷-LYY, YVPKPXX:VSQ:EPLT-AA¹⁷-LYY, TVPKPXX:VSQ:EPLT-AA¹⁷-LYY, AVPKAXX:VSQ:EPLT-AA¹⁷-LYY, KVGKAXX:VSQ:EPLT-AA¹⁷-LYY, KASKAXX:VSQ:EPLT-AA¹⁷-LYY, GSAGPXX:VSQ:EPLT-AA¹⁷-LYY, AAPASXX:VSQ:EPLT-AA¹⁷-LYY, STPPTXX:VSQ:EPLT-AA¹⁷-LYY, HVPKPXX:VSQ:EPLT-AA¹⁷-LYY, RVPSTXX:VSQ:EPLT-AA¹⁷-LYY, ASAAPXX:VSQ:EPLT-AA¹⁷-LYY, ASASPXX:VSQ:EPLT-AA¹⁷-LYY, KIPKAXX:VPT:EPLT-AA¹⁷-LYY, GIPEPXX:VPE:EPLT-AA¹⁷-LYY, SIPKAXX:VPT:EPLT-AA¹⁷-LYY, HVTKPTX:APT:EPLT-AA¹⁷-LYY, YVPKPXX:APT:EPLT-AA¹⁷-LYY, TVPKPXX:APT:EPLT-AA¹⁷-LYY, AVPKAXX:APT:EPLT-AA¹⁷-LYY, KVGKAXX:VPT:EPLT-AA¹⁷-LYY, KASKAXX:VPT:EPLT-AA¹⁷-LYY, GSAGPXX:TPT:EPLT-AA¹⁷-LYY, AAPASXX:VPA:EPLT-AA¹⁷-LYY, STPPTXX:VPT:EPLT-AA¹⁷-LYY, HVPKPXX:APT:EPLT-AA¹⁷-LYY, RVPSTXX:APV:EPLT-AA¹⁷-LYY, ASAAPXX:VPQ:EPLT-AA¹⁷-LYY, NDEGLEX:VPT:EPLT-AA¹⁷-LYY, SSVKXQP:SRV:EPLT-AA¹⁷-LYY, RNVQXRP:TQV:EPLT-AA¹⁷-LYY, KIPKAXX:VPQ:EPLT-AA¹⁷-LYY, GIPEPXX:VPQ:EPLT-AA¹⁷-LYY, SIPKAXX:VPQ:EPLT-AA¹⁷-LYY, HVTKPTX:VPQ:EPLT-AA¹⁷-LYY, YVPKPXX:VPQ:EPLT-AA¹⁷-LYY, TVPKPXX:VPQ:EPLT-AA¹⁷-LYY, AVPKAXX:VPQ:EPLT-AA¹⁷-LYY, KVGKAXX:VPQ:EPLT-AA¹⁷-LYY, KASKAXX:VPQ:EPLT-AA¹⁷-LYY, GSAGPXX:VPQ:EPLT-AA¹⁷-LYY, AAPASXX:VPQ:EPLT-AA¹⁷-LYY, STPPTXX:VPQ:EPLT-AA¹⁷-LYY, HVPKPXX:VPQ:EPLT-AA¹⁷-LYY, RVPSTXX:VPQ:EPLT-AA¹⁷-LYY, ASASPXX:VPQ:EPLT-AA¹⁷-LYY, NDEGLEX:VPT:SNIT-AA¹⁷-QIM, GIPEPXX:VPE:SNIT-AA¹⁷-QIM, HVTKPTX:APT:SNIT-AA¹⁷-QIM, YVPKPXX:APT:SNIT-AA¹⁷-QIM, TVPKPXX:APT:SNIT-AA¹⁷-QIM, AVPKAXX:APT:SNIT-AA¹⁷-QIM, GSAGPXX:TPT:SNIT-AA¹⁷-QIM, AAPASXX:VPA:SNIT-AA¹⁷-QIM, HVPKPXX:APT:SNIT-AA¹⁷-QIM, RVPSTXX:APV:SNIT-AA¹⁷-QIM, ASAAPXX:VPQ:SNIT-AA¹⁷-QIM, ASASPXX:VSQ:SNIT-AA¹⁷-QIM, ASASPXX:VPQ:SNIT-AA¹⁷-QIM, SSVKXQP:SRV:SNIT-AA¹⁷-QIM, RNVQXRP:TQV:SNIT-AA¹⁷-QIM, RNVQXRP:SRV:RSVK-AA¹⁷-AKV, KIPKAXX:VPT:RSVK-AA¹⁷-AKV, GIPEPXX:VPE:RSVK-AA¹⁷-AKV, SIPKAXX:VPT:RSVK-AA¹⁷-AKV, HVTKPTX:APT:RSVK-AA¹⁷-AKV, YVPKPXX:APT:RSVK-AA¹⁷-AKV, TVPKPXX:APT:RSVK-AA¹⁷-AKV, AVPKAXX:APT:RSVK-AA¹⁷-AKV, KVGKAXX:VPT:RSVK-AA¹⁷-AKV, KASKAXX:VPT:RSVK-AA¹⁷-AKV, GSAGPXX:TPT:RSVK-AA¹⁷-AKV, AAPASXX:VPA:RSVK-AA¹⁷-AKV, STPPTXX:VPT:RSVK-AA¹⁷-AKV, HVPKPXX:APT:RSVK-AA¹⁷-AKV, RVPSTXX:APV:RSVK-AA¹⁷-AKV, ASAAPXX:VPQ:RSVK-AA¹⁷-AKV, ASASPXX:VSQ:RSVK-AA¹⁷-AKV, ASASPXX:VPQ:RSVK-AA¹⁷-AKV, NDEGLEX:VPT:RSVK-AA¹⁷-AKV, RNVQXRP:TQV:RSVK-AA¹⁷-AKV, SSVKXQP:TQV:RPVQ-AA¹⁷-RKI, KIPKAXX:VPT:RPVQ-AA¹⁷-RKI, GIPEPXX:VPE:RPVQ-AA¹⁷-RKI, SIPKAXX:VPT:RPVQ-AA¹⁷-RKI, HVTKPTX:APT:RPVQ-AA¹⁷-RKI, YVPKPXX:APT:RPVQ-AA¹⁷-RKI, TVPKPXX:APT:RPVQ-AA¹⁷-RKI, AVPKAXX:APT:RPVQ-AA¹⁷-RKI, KVGKAXX:VPT:RPVQ-AA¹⁷-RKI, KASKAXX:VPT:RPVQ-AA¹⁷-RKI, GSAGPXX:TPT:RPVQ-AA¹⁷-RKI, AAPASXX:VPA:RPVQ-AA¹⁷-RKI, STPPTXX:VPT:RPVQ-AA¹⁷-RKI, HVPKPXX:APT:RPVQ-AA¹⁷-RKI, RVPSTXX:APV:RPVQ-AA¹⁷-RKI, ASAAPXX:VPQ:RPVQ-AA¹⁷-RKI, ASASPXX:VSQ:RPVQ-AA¹⁷-RKI, ASASPXX:VPQ:RPVQ-AA¹⁷-RKI, NDEGLEX:VPT:RPVQ-AA¹⁷-RKI and SSVKXQP:SRV:RPVQ-AA¹⁷-RKI; and wherein AA¹⁷ is selected from the group consisting of G, A, V, L, I, P, F, M, W, T and S (in particular is selected from the group consisting of M, I, L, V and T).

[0327] In certain embodiments, the triplet PEP7:PEP5:PEP1 is selected from the group consisting of GIPEPXX:VPTKM:SAIS, HVTKPTX:VPTKL:SAIS, YVPKPXX:VPTKL:SAIS, TVPKPXX:VPTQL:SAIS, AVPKAXX:VPTKL:SAIS, KVGKAXX:VPTKL:SAIS, KASKAXX:VPTKL:SAIS, GSAGPXX:VPTKM:SAIS, AAPASXX:VPTRL:SAIS, STPPTXX:VPTRL:SAIS, HVPKPXX:VPTKL:SAIS, RVPSTXX:VPTKT:SAIS, ASAAPXX:VPTAL:SAIS, ASASPXX:VPTDL:SAIS, GIPEPXX:VPEKM:SAIS, HVTKPTX:APTKL:SAIS, YVPKPXX:APTKL:SAIS, TVPKPXX:APTQL:SAIS, AVPKAXX:APTKL:SAIS, GSAGPXX:TPTKM:SAIS, AAPASXX:VPARL:SAIS, HVPKPXX:APTKL:SAIS, RVPSTXX:APVKT:SAIS, ASAAPXX:VPQAL:SAIS, ASASPXX:VSQDL:SAIS, ASASPXX:VPQDL:SAIS, SSVKXQP:SRVHH:SAIS, RNVQXRP:TQVQL:SAIS, KIPKAXX:VPEEL:SSLS, SIPKAXX:VPEEL:SSLS, HVTKPTX:VPEKL:SSLS, YVPKPXX:VPEKL:SSLS, TVPKPXX:VPEQL:SSLS, AVPKAXX:VPEKL:SSLS, KVGKAXX:VPEKL:SSLS, KASKAXX:VPEKL:SSLS, GSAGPXX:VPEKM:SSLS, AAPASXX:VPERL:SSLS, STPPTXX:VPERL:SSLS, HVPKPXX:VPEKL:SSLS, RVPSTXX:VPEKT:SSLS, ASAAPXX:VPEAL:SSLS, ASASPXX:VPEDL:SSLS, KIPKAXX:VPTEL:SSLS, SIPKAXX:VPTEL:SSLS, HVTKPTX:APTKL:SSLS, YVPKPXX:APTKL:SSLS, TVPKPXX:APTQL:SSLS, AVPKAXX:APTKL:SSLS, KVGKAXX:VPTKL:SSLS, KASKAXX:VPTKL:SSLS, GSAGPXX:TPTKM:SSLS, AAPASXX:VPARL:SSLS, STPPTXX:VPTRL:SSLS, HVPKPXX:APTKL:SSLS, RVPSTXX:APVKT:SSLS, ASAAPXX:VPQAL:SSLS, ASASPXX:VSQDL:SSLS, ASASPXX:VPQDL:SSLS, NDEGLEX:VPTEE:SSLS, NDEGLEX:VPTGQ:SSLS, SSVKXQP:SRVHH:SSLS, RNVQXRP:TQVQL:SSLS, KIPKAXX:APTEL:NAIS, GIPEPXX:APTKM:NAIS, SIPKAXX:APTEL:NAIS, AVPKAXX:APTKL:NAIS, KVGKAXX:APTKL:NAIS, KASKAXX:APTKL:NAIS, GSAGPXX:APTKM:NAIS, AAPASXX:APTRL:NAIS, STPPTXX:APTRL:NAIS, RVPSTXX:APTKT:NAIS, ASAAPXX:APTAL:NAIS, ASASPXX:APTDL:NAIS, KIPKAXX:VPTEL:NAIS, GIPEPXX:VPEKM:NAIS, SIPKAXX:VPTEL:NAIS, KVGKAXX:VPTKL:NAIS, KASKAXX:VPTKL:NAIS, GSAGPXX:TPTKM:NAIS, AAPASXX:VPARL:NAIS, STPPTXX:VPTRL:NAIS, RVPSTXX:APVKT:NAIS, ASAAPXX:VPQAL:NAIS, ASASPXX:VSQDL:NAIS, ASASPXX:VPQDL:NAIS, NDEGLEX:VPTEE:NAIS, NDEGLEX:VPTGQ:NAIS, SSVKXQP:SRVHH:NAIS, RNVQXRP:TQVQL:NAIS, KIPKAXX:APTEL:SATS, GIPEPXX:APTKM:SATS, SIPKAXX:APTEL:SATS, HVTKPTX:APTKL:SATS, YVPKPXX:APTKL:SATS, TVPKPXX:APTQL:SATS, KVGKAXX:APTKL:SATS, KASKAXX:APTKL:SATS, GSAGPXX:APTKM:SATS, AAPASXX:APTRL:SATS, STPPTXX:APTRL:SATS, HVPKPXX:APTKL:SATS, RVPSTXX:APTKT:SATS, ASAAPXX:APTAL:SATS, ASASPXX:APTDL:SATS, KIPKAXX:VPTEL:SATS, GIPEPXX:VPEKM:SATS, SIPKAXX:VPTEL:SATS, KVGKAXX:VPTKL:SATS, KASKAXX:VPTKL:SATS, GSAGPXX:TPTKM:SATS, AAPASXX:VPARL:SATS, STPPTXX:VPTRL:SATS, RVPSTXX:APVKT:SATS, ASAAPXX:VPQAL:SATS, ASASPXX:VSQDL:SATS, ASASPXX:VPQDL:SATS, NDEGLEX:VPTEE:SATS, NDEGLEX:VPTGQ:SATS, SSVKXQP:SRVHH:SATS, RNVQXRP:TQVQL:SATS, KIPKAXX:VPTEL:SPIS, GIPEPXX:VPTKM:SPIS, SIPKAXX:VPTEL:SPIS, HVTKPTX:VPTKL:SPIS, YVPKPXX:VPTKL:SPIS, TVPKPXX:VPTQL:SPIS, AVPKAXX:VPTKL:SPIS, KASKAXX:VPTKL:SPIS, GSAGPXX:VPTKM:SPIS, AAPASXX:VPTRL:SPIS, STPPTXX:VPTRL:SPIS, HVPKPXX:VPTKL:SPIS, RVPSTXX:VPTKT:SPIS, ASAAPXX:VPTAL:SPIS, ASASPXX:VPTDL:SPIS, GIPEPXX:VPEKM:SPIS, HVTKPTX:APTKL:SPIS, YVPKPXX:APTKL:SPIS, TVPKPXX:APTQL:SPIS, AVPKAXX:APTKL:SPIS, GSAGPXX:TPTKM:SPIS, AAPASXX:VPARL:SPIS, HVPKPXX:APTKL:SPIS, RVPSTXX:APVKT:SPIS, ASAAPXX:VPQAL:SPIS, ASASPXX:VSQDL:SPIS, ASASPXX:VPQDL:SPIS, SSVKXQP:SRVHH:SPIS, RNVQXRP:TQVQL:SPIS, KIPKAXX:VPTEL:EPIS, GIPEPXX:VPTKM:EPIS, SIPKAXX:VPTEL:EPIS, HVTKPTX:VPTKL:EPIS, YVPKPXX:VPTKL:EPIS, TVPKPXX:VPTQL:EPIS, AVPKAXX:VPTKL:EPIS, KVGKAXX:VPTKL:EPIS, GSAGPXX:VPTKM:EPIS, AAPASXX:VPTRL:EPIS, STPPTXX:VPTRL:EPIS, HVPKPXX:VPTKL:EPIS, RVPSTXX:VPTKT:EPIS, ASAAPXX:VPTAL:EPIS, ASASPXX:VPTDL:EPIS, GIPEPXX:VPEKM:EPIS, HVTKPTX:APTKL:EPIS, YVPKPXX:APTKL:EPIS, TVPKPXX:APTQL:EPIS, AVPKAXX:APTKL:EPIS, GSAGPXX:TPTKM:EPIS, AAPASXX:VPARL:EPIS, HVPKPXX:APTKL:EPIS, RVPSTXX:APVKT:EPIS, ASAAPXX:VPQAL:EPIS, ASASPXX:VSQDL:EPIS, ASASPXX:VPQDL:EPIS, SSVKXQP:SRVHH:EPIS, RNVQXRP:TQVQL:EPIS, KIPKAXX:TPTEL:SPIN, GIPEPXX:TPTKM:SPIN, SIPKAXX:TPTEL:SPIN, HVTKPTX:TPTKL:SPIN, YVPKPXX:TPTKL:SPIN, TVPKPXX:TPTQL:SPIN, AVPKAXX:TPTKL:SPIN, KVGKAXX:TPTKL:SPIN, KASKAXX:TPTKL:SPIN, AAPASXX:TPTRL:SPIN, STPPTXX:TPTRL:SPIN, HVPKPXX:TPTKL:SPIN, RVPSTXX:TPTKT:SPIN, ASAAPXX:TPTAL:SPIN, ASASPXX:TPTDL:SPIN, KIPKAXX:VPTEL:SPIN, GIPEPXX:VPEKM:SPIN, SIPKAXX:VPTEL:SPIN, HVTKPTX:APTKL:SPIN, YVPKPXX:APTKL:SPIN, TVPKPXX:APTQL:SPIN, AVPKAXX:APTKL:SPIN, KVGKAXX:VPTKL:SPIN, KASKAXX:VPTKL:SPIN, AAPASXX:VPARL:SPIN, STPPTXX:VPTRL:SPIN, HVPKPXX:APTKL:SPIN, RVPSTXX:APVKT:SPIN, ASAAPXX:VPQAL:SPIN, ASASPXX:VSQDL:SPIN, ASASPXX:VPQDL:SPIN, NDEGLEX:VPTEE:SPIN, NDEGLEX:VPTGQ:SPIN, SSVKXQP:SRVHH:SPIN, RNVQXRP:TQVQL:SPIN, KIPKAXX:VPAEL:SPIS, GIPEPXX:VPAKM:SPIS, SIPKAXX:VPAEL:SPIS, HVTKPTX:VPAKL:SPIS, YVPKPXX:VPAKL:SPIS, TVPKPXX:VPAQL:SPIS, AVPKAXX:VPAKL:SPIS, KVGKAXX:VPAKL:SPIS, KASKAXX:VPAKL:SPIS, GSAGPXX:VPAKM:SPIS, STPPTXX:VPARL:SPIS, HVPKPXX:VPAKL:SPIS, RVPSTXX:VPAKT:SPIS, ASAAPXX:VPAAL:SPIS, ASASPXX:VPADL:SPIS, KVGKAXX:VPTKL:SPIS, NDEGLEX:VPTEE:SPIS, NDEGLEX:VPTGQ:SPIS, KIPKAXX:APVEL:KPLS, GIPEPXX:APVKM:KPLS, SIPKAXX:APVEL:KPLS, HVTKPTX:APVKL:KPLS, YVPKPXX:APVKL:KPLS, TVPKPXX:APVQL:KPLS, AVPKAXX:APVKL:KPLS, KVGKAXX:APVKL:KPLS, KASKAXX:APVKL:KPLS, GSAGPXX:APVKM:KPLS, AAPASXX:APVRL:KPLS, STPPTXX:APVRL:KPLS, HVPKPXX:APVKL:KPLS, ASAAPXX:APVAL:KPLS, ASASPXX:APVDL:KPLS, KIPKAXX:VPTEL:KPLS, GIPEPXX:VPEKM:KPLS, SIPKAXX:VPTEL:KPLS, HVTKPTX:APTKL:KPLS, YVPKPXX:APTKL:KPLS, TVPKPXX:APTQL:KPLS, AVPKAXX:APTKL:KPLS, KVGKAXX:VPTKL:KPLS, KASKAXX:VPTKL:KPLS, GSAGPXX:TPTKM:KPLS, AAPASXX:VPARL:KPLS, STPPTXX:VPTRL:KPLS, HVPKPXX:APTKL:KPLS, ASAAPXX:VPQAL:KPLS, ASASPXX:VSQDL:KPLS, ASASPXX:VPQDL:KPLS, NDEGLEX:VPTEE:KPLS, NDEGLEX:VPTGQ:KPLS, SSVKXQP:SRVHH:KPLS, RNVQXRP:TQVQL:KPLS, KIPKAXX:VPQEL:EPLP, GIPEPXX:VPQKM:EPLP, SIPKAXX:VPQEL:EPLP, HVTKPTX:VPQKL:EPLP, YVPKPXX:VPQKL:EPLP, TVPKPXX:VPQQL:EPLP, AVPKAXX:VPQKL:EPLP, KVGKAXX:VPQKL:EPLP, KASKAXX:VPQKL:EPLP, GSAGPXX:VPQKM:EPLP, AAPASXX:VPQRL:EPLP, STPPTXX:VPQRL:EPLP, HVPKPXX:VPQKL:EPLP, RVPSTXX:VPQKT:EPLP, ASASPXX:VPQDL:EPLP, KIPKAXX:VPTEL:EPLP, GIPEPXX:VPEKM:EPLP, SIPKAXX:VPTEL:EPLP, HVTKPTX:APTKL:EPLP, YVPKPXX:APTKL:EPLP, TVPKPXX:APTQL:EPLP, AVPKAXX:APTKL:EPLP, KVGKAXX:VPTKL:EPLP, KASKAXX:VPTKL:EPLP, GSAGPXX:TPTKM:EPLP, AAPASXX:VPARL:EPLP, STPPTXX:VPTRL:EPLP, HVPKPXX:APTKL:EPLP, RVPSTXX:APVKT:EPLP, ASASPXX:VSQDL:EPLP, NDEGLEX:VPTEE:EPLP, NDEGLEX:VPTGQ:EPLP, SSVKXQP:SRVHH:EPLP, RNVQXRP:TQVQL:EPLP, KIPKAXX:VSQEL:EPLT, GIPEPXX:VSQKM:EPLT, SIPKAXX:VSQEL:EPLT, HVTKPTX:VSQKL:EPLT, YVPKPXX:VSQKL:EPLT, TVPKPXX:VSQQL:EPLT, AVPKAXX:VSQKL:EPLT, KVGKAXX:VSQKL:EPLT, KASKAXX:VSQKL:EPLT, GSAGPXX:VSQKM:EPLT, AAPASXX:VSQRL:EPLT, STPPTXX:VSQRL:EPLT, HVPKPXX:VSQKL:EPLT, RVPSTXX:VSQKT:EPLT, ASAAPXX:VSQAL:EPLT, ASASPXX:VSQDL:EPLT, KIPKAXX:VPTEL:EPLT, GIPEPXX:VPEKM:EPLT, SIPKAXX:VPTEL:EPLT, HVTKPTX:APTKL:EPLT, YVPKPXX:APTKL:EPLT, TVPKPXX:APTQL:EPLT, AVPKAXX:APTKL:EPLT, KVGKAXX:VPTKL:EPLT, KASKAXX:VPTKL:EPLT, GSAGPXX:TPTKM:EPLT, AAPASXX:VPARL:EPLT, STPPTXX:VPTRL:EPLT, HVPKPXX:APTKL:EPLT, RVPSTXX:APVKT:EPLT, ASAAPXX:VPQAL:EPLT, NDEGLEX:VPTEE:EPLT, NDEGLEX:VPTGQ:EPLT, SSVKXQP:SRVHH:EPLT, RNVQXRP:TQVQL:EPLT, KIPKAXX:VPQEL:EPLT, GIPEPXX:VPQKM:EPLT, SIPKAXX:VPQEL:EPLT, HVTKPTX:VPQKL:EPLT, YVPKPXX:VPQKL:EPLT, TVPKPXX:VPQQL:EPLT, AVPKAXX:VPQKL:EPLT, KVGKAXX:VPQKL:EPLT, KASKAXX:VPQKL:EPLT, GSAGPXX:VPQKM:EPLT, AAPASXX:VPQRL:EPLT, STPPTXX:VPQRL:EPLT, HVPKPXX:VPQKL:EPLT, RVPSTXX:VPQKT:EPLT, ASASPXX:VPQDL:EPLT, NDEGLEX:VPTGQ:SNIT, GIPEPXX:VPEKM:SNIT, HVTKPTX:APTKL:SNIT, YVPKPXX:APTKL:SNIT, TVPKPXX:APTQL:SNIT, AVPKAXX:APTKL:SNIT, GSAGPXX:TPTKM:SNIT, AAPASXX:VPARL:SNIT, HVPKPXX:APTKL:SNIT, RVPSTXX:APVKT:SNIT, ASAAPXX:VPQAL:SNIT, ASASPXX:VSQDL:SNIT, ASASPXX:VPQDL:SNIT, SSVKXQP:SRVHH:SNIT, RNVQXRP:TQVQL:SNIT, RNVQXRP:SRVQL:RSVK, KIPKAXX:VPTEL:RSVK, GIPEPXX:VPEKM:RSVK, SIPKAXX:VPTEL:RSVK, HVTKPTX:APTKL:RSVK, YVPKPXX:APTKL:RSVK, TVPKPXX:APTQL:RSVK, AVPKAXX:APTKL:RSVK, KVGKAXX:VPTKL:RSVK, KASKAXX:VPTKL:RSVK, GSAGPXX:TPTKM:RSVK, AAPASXX:VPARL:RSVK, STPPTXX:VPTRL:RSVK, HVPKPXX:APTKL:RSVK, RVPSTXX:APVKT:RSVK, ASAAPXX:VPQAL:RSVK, ASASPXX:VSQDL:RSVK, ASASPXX:VPQDL:RSVK, NDEGLEX:VPTEE:RSVK, NDEGLEX:VPTGQ:RSVK, RNVQXRP:TQVQL:RSVK, SSVKXQP:TQVHH:RPVQ, KIPKAXX:VPTEL:RPVQ, GIPEPXX:VPEKM:RPVQ, SIPKAXX:VPTEL:RPVQ, HVTKPTX:APTKL:RPVQ, YVPKPXX:APTKL:RPVQ, TVPKPXX:APTQL:RPVQ, AVPKAXX:APTKL:RPVQ, KVGKAXX:VPTKL:RPVQ, KASKAXX:VPTKL:RPVQ, GSAGPXX:TPTKM:RPVQ, AAPASXX:VPARL:RPVQ, STPPTXX:VPTRL:RPVQ, HVPKPXX:APTKL:RPVQ, RVPSTXX:APVKT:RPVQ, ASAAPXX:VPQAL:RPVQ, ASASPXX:VSQDL:RPVQ, ASASPXX:VPQDL:RPVQ, NDEGLEX:VPTEE:RPVQ, NDEGLEX:VPTGQ:RPVQ and SSVKXQP:SRVHH:RPVQ.

[0328] In certain embodiments, the triplet PEP7:PEP5:PEP12 is selected from the group consisting of GIPEPXX:VPTKM:SAIS-AA¹⁷-LYL, HVTKPTX:VPTKL:SAIS-AA¹⁷-LYL, YVPKPXX:VPTKL:SAIS-AA¹⁷-LYL, TVPKPXX:VPTQL:SAIS-AA¹⁷-LYL, AVPKAXX:VPTKL:SAIS-AA¹⁷-LYL, KVGKAXX:VPTKL:SAIS-AA¹⁷-LYL, KASKAXX:VPTKL:SAIS-AA¹⁷-LYL, GSAGPXX:VPTKM:SAIS-AA¹⁷-LYL, AAPASXX:VPTRL:SAIS-AA¹⁷-LYL, STPPTXX:VPTRL:SAIS-AA¹⁷-LYL, HVPKPXX:VPTKL:SAIS-AA¹⁷-LYL, RVPSTXX:VPTKT:SAIS-AA¹⁷-LYL, ASAAPXX:VPTAL:SAIS-AA¹⁷-LYL, ASASPXX:VPTDL:SAIS-AA¹⁷-LYL, GIPEPXX:VPEKM:SAIS-AA¹⁷-LYL, HVTKPTX:APTKL:SAIS-AA¹⁷-LYL, YVPKPXX:APTKL:SAIS-AA¹⁷-LYL, TVPKPXX:APTQL:SAIS-AA¹⁷-LYL, AVPKAXX:APTKL:SAIS-AA¹⁷-LYL, GSAGPXX:TPTKM:SAIS-AA¹⁷-LYL, AAPASXX:VPARL:SAIS-AA¹⁷-LYL, HVPKPXX:APTKL:SAIS-AA¹⁷-LYL, RVPSTXX:APVKT:SAIS-AA¹⁷-LYL, ASAAPXX:VPQAL:SAIS-AA¹⁷-LYL, ASASPXX:VSQDL:SAIS-AA¹⁷-LYL, ASASPXX:VPQDL:SAIS-AA¹⁷-LYL, SSVKXQP:SRVHH:SAIS-AA¹⁷-LYL, RNVQXRP:TQVQL:SAIS-AA¹⁷-LYL, KIPKAXX:VPEEL:SSLS-AA¹⁷-LFF, SIPKAXX:VPEEL:SSLS-AA¹⁷-LFF, HVTKPTX:VPEKL:SSLS-AA¹⁷-LFF, YVPKPXX:VPEKL:SSLS-AA¹⁷-LFF, TVPKPXX:VPEQL:SSLS-AA¹⁷-LFF, AVPKAXX:VPEKL:SSLS-AA¹⁷-LFF, KVGKAXX:VPEKL:SSLS-AA¹⁷-LFF, KASKAXX:VPEKL:SSLS-AA¹⁷-LFF, GSAGPXX:VPEKM:SSLS-AA¹⁷-LFF, AAPASXX:VPERL:SSLS-AA¹⁷-LFF, STPPTXX:VPERL:SSLS-AA¹⁷-LFF, HVPKPXX:VPEKL:SSLS-AA¹⁷-LFF, RVPSTXX:VPEKT:SSLS-AA¹⁷-LFF, ASAAPXX:VPEAL:SSLS-AA¹⁷-LFF, ASASPXX:VPEDL:SSLS-AA¹⁷-LFF, KIPKAXX:VPTEL:SSLS-AA¹⁷-LFF, SIPKAXX:VPTEL:SSLS-AA¹⁷-LFF, HVTKPTX:APTKL:SSLS-AA¹⁷-LFF, YVPKPXX:APTKL:SSLS-AA¹⁷-LFF, TVPKPXX:APTQL:SSLS-AA¹⁷-LFF, AVPKAXX:APTKL:SSLS-AA¹⁷-LFF, KVGKAXX:VPTKL:SSLS-AA¹⁷-LFF, KASKAXX:VPTKL:SSLS-AA¹⁷-LFF, GSAGPXX:TPTKM:SSLS-AA¹⁷-LFF, AAPASXX:VPARL:SSLS-AA¹⁷-LFF, STPPTXX:VPTRL:SSLS-AA¹⁷-LFF, HVPKPXX:APTKL:SSLS-AA¹⁷-LFF, RVPSTXX:APVKT:SSLS-AA¹⁷-LFF, ASAAPXX:VPQAL:SSLS-AA¹⁷-LFF, ASASPXX:VSQDL:SSLS-AA¹⁷-LFF, ASASPXX:VPQDL:SSLS-AA¹⁷-LFF, NDEGLEX:VPTEE:SSLS-AA¹⁷-LFF, NDEGLEX:VPTGQ:SSLS-AA¹⁷-LFF, SSVKXQP:SRVHH:SSLS-AA¹⁷-LFF, RNVQXRP:TQVQL:SSLS-AA¹⁷-LFF, KIPKAXX:APTEL:NAIS-AA¹⁷-LYF, GIPEPXX:APTKM:NAIS-AA¹⁷-LYF, SIPKAXX:APTEL:NAIS-AA¹⁷-LYF, AVPKAXX:APTKL:NAIS-AA¹⁷-LYF, KVGKAXX:APTKL:NAIS-AA¹⁷-LYF, KASKAXX:APTKL:NAIS-AA¹⁷-LYF, GSAGPXX:APTKM:NAIS-AA¹⁷-LYF, AAPASXX:APTRL:NAIS-AA¹⁷-LYF, STPPTXX:APTRL:NAIS-AA¹⁷-LYF, RVPSTXX:APTKT:NAIS-AA¹⁷-LYF, ASAAPXX:APTAL:NAIS-AA¹⁷-LYF, ASASPXX:APTDL:NAIS-AA¹⁷-LYF, KIPKAXX:VPTEL:NAIS-AA¹⁷-LYF, GIPEPXX:VPEKM:NAIS-AA¹⁷-LYF, SIPKAXX:VPTEL:NAIS-AA¹⁷-LYF, KVGKAXX:VPTKL:NAIS-AA¹⁷-LYF, KASKAXX:VPTKL:NAIS-AA¹⁷-LYF, GSAGPXX:TPTKM:NAIS-AA¹⁷-LYF, AAPASXX:VPARL:NAIS-AA¹⁷-LYF, STPPTXX:VPTRL:NAIS-AA¹⁷-LYF, RVPSTXX:APVKT:NAIS-AA¹⁷-LYF, ASAAPXX:VPQAL:NAIS-AA¹⁷-LYF, ASASPXX:VSQDL:NAIS-AA¹⁷-LYF, ASASPXX:VPQDL:NAIS-AA¹⁷-LYF, NDEGLEX:VPTEE:NAIS-AA¹⁷-LYF, NDEGLEX:VPTGQ:NAIS-AA¹⁷-LYF, SSVKXQP:SRVHH:NAIS-AA¹⁷-LYF, RNVQXRP:TQVQL:NAIS-AA¹⁷-LYF, KIPKAXX:APTEL:SATS-AA¹⁷-LYY, GIPEPXX:APTKM:SATS-AA¹⁷-LYY, SIPKAXX:APTEL:SATS-AA¹⁷-LYY, HVTKPTX:APTKL:SATS-AA¹⁷-LYY, YVPKPXX:APTKL:SATS-AA¹⁷-LYY, TVPKPXX:APTQL:SATS-AA¹⁷-LYY, KVGKAXX:APTKL:SATS-AA¹⁷-LYY, KASKAXX:APTKL:SATS-AA¹⁷-LYY, GSAGPXX:APTKM:SATS-AA¹⁷-LYY, AAPASXX:APTRL:SATS-AA¹⁷-LYY, STPPTXX:APTRL:SATS-AA¹⁷-LYY, HVPKPXX:APTKL:SATS-AA¹⁷-LYY, RVPSTXX:APTKT:SATS-AA¹⁷-LYY, ASAAPXX:APTAL:SATS-AA¹⁷-LYY, ASASPXX:APTDL:SATS-AA¹⁷-LYY, KIPKAXX:VPTEL:SATS-AA¹⁷-LYY, GIPEPXX:VPEKM:SATS-AA¹⁷-LYY, SIPKAXX:VPTEL:SATS-AA¹⁷-LYY, KVGKAXX:VPTKL:SATS-AA¹⁷-LYY, KASKAXX:VPTKL:SATS-AA¹⁷-LYY, GSAGPXX:TPTKM:SATS-AA¹⁷-LYY, AAPASXX:VPARL:SATS-AA¹⁷-LYY, STPPTXX:VPTRL:SATS-AA¹⁷-LYY, RVPSTXX:APVKT:SATS-AA¹⁷-LYY, ASAAPXX:VPQAL:SATS-AA¹⁷-LYY, ASASPXX:VSQDL:SATS-AA¹⁷-LYY, ASASPXX:VPQDL:SATS-AA¹⁷-LYY, NDEGLEX:VPTEE:SATS-AA¹⁷-LYY, NDEGLEX:VPTGQ:SATS-AA¹⁷-LYY, SSVKXQP:SRVHH:SATS-AA¹⁷-LYY, RNVQXRP:TQVQL:SATS-AA¹⁷-LYY, KIPKAXX:VPTEL:SPIS-AA¹⁷-LYK, GIPEPXX:VPTKM:SPIS-AA¹⁷-LYK, SIPKAXX:VPTEL:SPIS-AA¹⁷-LYK, HVTKPTX:VPTKL:SPIS-AA¹⁷-LYK, YVPKPXX:VPTKL:SPIS-AA¹⁷-LYK, TVPKPXX:VPTQL:SPIS-AA¹⁷-LYK, AVPKAXX:VPTKL:SPIS-AA¹⁷-LYK, KASKAXX:VPTKL:SPIS-AA¹⁷-LYK, GSAGPXX:VPTKM:SPIS-AA¹⁷-LYK, AAPASXX:VPTRL:SPIS-AA¹⁷-LYK, STPPTXX:VPTRL:SPIS-AA¹⁷-LYK, HVPKPXX:VPTKL:SPIS-AA¹⁷-LYK, RVPSTXX:VPTKT:SPIS-AA¹⁷-LYK, ASAAPXX:VPTAL:SPIS-AA¹⁷-LYK, ASASPXX:VPTDL:SPIS-AA¹⁷-LYK, GIPEPXX:VPEKM:SPIS-AA¹⁷-LYK, HVTKPTX:APTKL:SPIS-AA¹⁷-LYK, YVPKPXX:APTKL:SPIS-AA¹⁷-LYK, TVPKPXX:APTQL:SPIS-AA¹⁷-LYK, AVPKAXX:APTKL:SPIS-AA¹⁷-LYK, GSAGPXX:TPTKM:SPIS-AA¹⁷-LYK, AAPASXX:VPARL:SPIS-AA¹⁷-LYK, HVPKPXX:APTKL:SPIS-AA¹⁷-LYK, RVPSTXX:APVKT:SPIS-AA¹⁷-LYK, ASAAPXX:VPQAL:SPIS-AA¹⁷-LYK, ASASPXX:VSQDL:SPIS-AA¹⁷-LYK, ASASPXX:VPQDL:SPIS-AA¹⁷-LYK, SSVKXQP:SRVHH:SPIS-AA¹⁷-LYK, RNVQXRP:TQVQL:SPIS-AA¹⁷-LYK, KIPKAXX:VPTEL:EPIS-AA¹⁷-LYL, GIPEPXX:VPTKM:EPIS-AA¹⁷-LYL, SIPKAXX:VPTEL:EPIS-AA¹⁷-LYL, HVTKPTX:VPTKL:EPIS-AA¹⁷-LYL, YVPKPXX:VPTKL:EPIS-AA¹⁷-LYL, TVPKPXX:VPTQL:EPIS-AA¹⁷-LYL, AVPKAXX:VPTKL:EPIS-AA¹⁷-LYL, KVGKAXX:VPTKL:EPIS-AA¹⁷-LYL, GSAGPXX:VPTKM:EPIS-AA¹⁷-LYL, AAPASXX:VPTRL:EPIS-AA¹⁷-LYL, STPPTXX:VPTRL:EPIS-AA¹⁷-LYL, HVPKPXX:VPTKL:EPIS-AA¹⁷-LYL, RVPSTXX:VPTKT:EPIS-AA¹⁷-LYL, ASAAPXX:VPTAL:EPIS-AA¹⁷-LYL, ASASPXX:VPTDL:EPIS-AA¹⁷-LYL, GIPEPXX:VPEKM:EPIS-AA¹⁷-LYL, HVTKPTX:APTKL:EPIS-AA¹⁷-LYL, YVPKPXX:APTKL:EPIS-AA¹⁷-LYL, TVPKPXX:APTQL:EPIS-AA¹⁷-LYL, AVPKAXX:APTKL:EPIS-AA¹⁷-LYL, GSAGPXX:TPTKM:EPIS-AA¹⁷-LYL, AAPASXX:VPARL:EPIS-AA¹⁷-LYL, HVPKPXX:APTKL:EPIS-AA¹⁷-LYL, RVPSTXX:APVKT:EPIS-AA¹⁷-LYL, ASAAPXX:VPQAL:EPIS-AA¹⁷-LYL, ASASPXX:VSQDL:EPIS-AA¹⁷-LYL, ASASPXX:VPQDL:EPIS-AA¹⁷-LYL, SSVKXQP:SRVHH:EPIS-AA¹⁷-LYL, RNVQXRP:TQVQL:EPIS-AA¹⁷-LYL, KIPKAXX:TPTEL:SPIN-AA¹⁷-LYF, GIPEPXX:TPTKM:SPIN-AA¹⁷-LYF, SIPKAXX:TPTEL:SPIN-AA¹⁷-LYF, HVTKPTX:TPTKL:SPIN-AA¹⁷-LYF, YVPKPXX:TPTKL:SPIN-AA¹⁷-LYF, TVPKPXX:TPTQL:SPIN-AA¹⁷-LYF, AVPKAXX:TPTKL:SPIN-AA¹⁷-LYF, KVGKAXX:TPTKL:SPIN-AA¹⁷-LYF, KASKAXX:TPTKL:SPIN-AA¹⁷-LYF, AAPASXX:TPTRL:SPIN-AA¹⁷-LYF, STPPTXX:TPTRL:SPIN-AA¹⁷-LYF, HVPKPXX:TPTKL:SPIN-AA¹⁷-LYF, RVPSTXX:TPTKT:SPIN-AA¹⁷-LYF, ASAAPXX:TPTAL:SPIN-AA¹⁷-LYF, ASASPXX:TPTDL:SPIN-AA¹⁷-LYF, KIPKAXX:VPTEL:SPIN-AA¹⁷-LYF, GIPEPXX:VPEKM:SPIN-AA¹⁷-LYF, SIPKAXX:VPTEL:SPIN-AA¹⁷-LYF, HVTKPTX:APTKL:SPIN-AA¹⁷-LYF, YVPKPXX:APTKL:SPIN-AA¹⁷-LYF, TVPKPXX:APTQL:SPIN-AA¹⁷-LYF, AVPKAXX:APTKL:SPIN-AA¹⁷-LYF, KVGKAXX:VPTKL:SPIN-AA¹⁷-LYF, KASKAXX:VPTKL:SPIN-AA¹⁷-LYF, AAPASXX:VPARL:SPIN-AA¹⁷-LYF, STPPTXX:VPTRL:SPIN-AA¹⁷-LYF, HVPKPXX:APTKL:SPIN-AA¹⁷-LYF, RVPSTXX:APVKT:SPIN-AA¹⁷-LYF, ASAAPXX:VPQAL:SPIN-AA¹⁷-LYF, ASASPXX:VSQDL:SPIN-AA¹⁷-LYF, ASASPXX:VPQDL:SPIN-AA¹⁷-LYF, NDEGLEX:VPTEE:SPIN-AA¹⁷-LYF, NDEGLEX:VPTGQ:SPIN-AA¹⁷-LYF, SSVKXQP:SRVHH:SPIN-AA¹⁷-LYF, RNVQXRP:TQVQL:SPIN-AA¹⁷-LYF, KIPKAXX:VPAEL:SPIS-AA¹⁷-LYI, GIPEPXX:VPAKM:SPIS-AA¹⁷-LYI, SIPKAXX:VPAEL:SPIS-AA¹⁷-LYI, HVTKPTX:VPAKL:SPIS-AA¹⁷-LYI, YVPKPXX:VPAKL:SPIS-AA¹⁷-LYI, TVPKPXX:VPAQL:SPIS-AA¹⁷-LYI, AVPKAXX:VPAKL:SPIS-AA¹⁷-LYI, KVGKAXX:VPAKL:SPIS-AA¹⁷-LYI, KASKAXX:VPAKL:SPIS-AA¹⁷-LYI, GSAGPXX:VPAKM:SPIS-AA¹⁷-LYI, STPPTXX:VPARL:SPIS-AA¹⁷-LYI, HVPKPXX:VPAKL:SPIS-AA¹⁷-LYI, RVPSTXX:VPAKT:SPIS-AA¹⁷-LYI, ASAAPXX:VPAAL:SPIS-AA¹⁷-LYI, ASASPXX:VPADL:SPIS-AA¹⁷-LYI, KIPKAXX:VPTEL:SPIS-AA¹⁷-LYI, GIPEPXX:VPEKM:SPIS-AA¹⁷-LYI, SIPKAXX:VPTEL:SPIS-AA¹⁷-LYI, HVTKPTX:APTKL:SPIS-AA¹⁷-LYI, YVPKPXX:APTKL:SPIS-AA¹⁷-LYI, TVPKPXX:APTQL:SPIS-AA¹⁷-LYI, AVPKAXX:APTKL:SPIS-AA¹⁷-LYI, KVGKAXX:VPTKL:SPIS-AA¹⁷-LYI, KASKAXX:VPTKL:SPIS-AA¹⁷-LYI, GSAGPXX:TPTKM:SPIS-AA¹⁷-LYI, STPPTXX:VPTRL:SPIS-AA¹⁷-LYI, HVPKPXX:APTKL:SPIS-AA¹⁷-LYI, RVPSTXX:APVKT:SPIS-AA¹⁷-LYI, ASAAPXX:VPQAL:SPIS-AA¹⁷-LYI, ASASPXX:VSQDL:SPIS-AA¹⁷-LYI, ASASPXX:VPQDL:SPIS-AA¹⁷-LYI, NDEGLEX:VPTEE:SPIS-AA¹⁷-LYI, NDEGLEX:VPTGQ:SPIS-AA¹⁷-LYI, SSVKXQP:SRVHH:SPIS-AA¹⁷-LYI, RNVQXRP:TQVQL:SPIS-AA¹⁷-LYI, KIPKAXX:VPTEL:SPIS-AA¹⁷-LFI, GIPEPXX:VPTKM:SPIS-AA¹⁷-LFI, SIPKAXX:VPTEL:SPIS-AA¹⁷-LFI, HVTKPTX:VPTKL:SPIS-AA¹⁷-LFI, YVPKPXX:VPTKL:SPIS-AA¹⁷-LFI, TVPKPXX:VPTQL:SPIS-AA¹⁷-LFI, AVPKAXX:VPTKL:SPIS-AA¹⁷-LFI, KVGKAXX:VPTKL:SPIS-AA¹⁷-LFI, KASKAXX:VPTKL:SPIS-AA¹⁷-LFI, GSAGPXX:VPTKM:SPIS-AA¹⁷-LFI, AAPASXX:VPTRL:SPIS-AA¹⁷-LFI, HVPKPXX:VPTKL:SPIS-AA¹⁷-LFI, RVPSTXX:VPTKT:SPIS-AA¹⁷-LFI, ASAAPXX:VPTAL:SPIS-AA¹⁷-LFI, ASASPXX:VPTDL:SPIS-AA¹⁷-LFI, GIPEPXX:VPEKM:SPIS-AA¹⁷-LFI, HVTKPTX:APTKL:SPIS-AA¹⁷-LFI, YVPKPXX:APTKL:SPIS-AA¹⁷-LFI, TVPKPXX:APTQL:SPIS-AA¹⁷-LFI, AVPKAXX:APTKL:SPIS-AA¹⁷-LFI, GSAGPXX:TPTKM:SPIS-AA¹⁷-LFI, AAPASXX:VPARL:SPIS-AA¹⁷-LFI, HVPKPXX:APTKL:SPIS-AA¹⁷-LFI, RVPSTXX:APVKT:SPIS-AA¹⁷-LFI, ASAAPXX:VPQAL:SPIS-AA¹⁷-LFI, ASASPXX:VSQDL:SPIS-AA¹⁷-LFI, ASASPXX:VPQDL:SPIS-AA¹⁷-LFI, SSVKXQP:SRVHH:SPIS-AA¹⁷-LFI, RNVQXRP:TQVQL:SPIS-AA¹⁷-LFI, KIPKAXX:APVEL:KPLS-AA¹⁷-LYV, GIPEPXX:APVKM:KPLS-AA¹⁷-LYV, SIPKAXX:APVEL:KPLS-AA¹⁷-LYV, HVTKPTX:APVKL:KPLS-AA¹⁷-LYV, YVPKPXX:APVKL:KPLS-AA¹⁷-LYV, TVPKPXX:APVQL:KPLS-AA¹⁷-LYV, AVPKAXX:APVKL:KPLS-AA¹⁷-LYV, KVGKAXX:APVKL:KPLS-AA¹⁷-LYV, KASKAXX:APVKL:KPLS-AA¹⁷-LYV, GSAGPXX:APVKM:KPLS-AA¹⁷-LYV, AAPASXX:APVRL:KPLS-AA¹⁷-LYV, STPPTXX:APVRL:KPLS-AA¹⁷-LYV, HVPKPXX:APVKL:KPLS-AA¹⁷-LYV, ASAAPXX:APVAL:KPLS-AA¹⁷-LYV, ASASPXX:APVDL:KPLS-AA¹⁷-LYV, KIPKAXX:VPTEL:KPLS-AA¹⁷-LYV, GIPEPXX:VPEKM:KPLS-AA¹⁷-LYV, SIPKAXX:VPTEL:KPLS-AA¹⁷-LYV, HVTKPTX:APTKL:KPLS-AA¹⁷-LYV, YVPKPXX:APTKL:KPLS-AA¹⁷-LYV, TVPKPXX:APTQL:KPLS-AA¹⁷-LYV, AVPKAXX:APTKL:KPLS-AA¹⁷-LYV, KVGKAXX:VPTKL:KPLS-AA¹⁷-LYV, KASKAXX:VPTKL:KPLS-AA¹⁷-LYV, GSAGPXX:TPTKM:KPLS-AA¹⁷-LYV, AAPASXX:VPARL:KPLS-AA¹⁷-LYV, STPPTXX:VPTRL:KPLS-AA¹⁷-LYV, HVPKPXX:APTKL:KPLS-AA¹⁷-LYV, ASAAPXX:VPQAL:KPLS-AA¹⁷-LYV, ASASPXX:VSQDL:KPLS-AA¹⁷-LYV, ASASPXX:VPQDL:KPLS-AA¹⁷-LYV, NDEGLEX:VPTEE:KPLS-AA¹⁷-LYV, NDEGLEX:VPTGQ:KPLS-AA¹⁷-LYV, SSVKXQP:SRVHH:KPLS-AA¹⁷-LYV, RNVQXRP:TQVQL:KPLS-AA¹⁷-LYV, KIPKAXX:VPQEL:EPLP-AA¹⁷-VYY, GIPEPXX:VPQKM:EPLP-AA¹⁷-VYY, SIPKAXX:VPQEL:EPLP-AA¹⁷-VYY, HVTKPTX:VPQKL:EPLP-AA¹⁷-VYY, YVPKPXX:VPQKL:EPLP-AA¹⁷-VYY, TVPKPXX:VPQQL:EPLP-AA¹⁷-VYY, AVPKAXX:VPQKL:EPLP-AA¹⁷-VYY, KVGKAXX:VPQKL:EPLP-AA¹⁷-VYY, KASKAXX:VPQKL:EPLP-AA¹⁷-VYY, GSAGPXX:VPQKM:EPLP-AA¹⁷-VYY, AAPASXX:VPQRL:EPLP-AA¹⁷-VYY, STPPTXX:VPQRL:EPLP-AA¹⁷-VYY, HVPKPXX:VPQKL:EPLP-AA¹⁷-VYY, RVPSTXX:VPQKT:EPLP-AA¹⁷-VYY, ASASPXX:VPQDL:EPLP-AA¹⁷-VYY, KIPKAXX:VPTEL:EPLP-AA¹⁷-VYY, GIPEPXX:VPEKM:EPLP-AA¹⁷-VYY, SIPKAXX:VPTEL:EPLP-AA¹⁷-VYY, HVTKPTX:APTKL:EPLP-AA¹⁷-VYY, YVPKPXX:APTKL:EPLP-AA¹⁷-VYY, TVPKPXX:APTQL:EPLP-AA¹⁷-VYY, AVPKAXX:APTKL:EPLP-AA¹⁷-VYY, KVGKAXX:VPTKL:EPLP-AA¹⁷-VYY, KASKAXX:VPTKL:EPLP-AA¹⁷-VYY, GSAGPXX:TPTKM:EPLP-AA¹⁷-VYY, AAPASXX:VPARL:EPLP-AA¹⁷-VYY, STPPTXX:VPTRL:EPLP-AA¹⁷-VYY, HVPKPXX:APTKL:EPLP-AA¹⁷-VYY, RVPSTXX:APVKT:EPLP-AA¹⁷-VYY, ASASPXX:VSQDL:EPLP-AA¹⁷-VYY, NDEGLEX:VPTEE:EPLP-AA¹⁷-VYY, NDEGLEX:VPTGQ:EPLP-AA¹⁷-VYY, SSVKXQP:SRVHH:EPLP-AA¹⁷-VYY, RNVQXRP:TQVQL:EPLP-AA¹⁷-VYY, KIPKAXX:VSQEL:EPLT-AA¹⁷-LYY, GIPEPXX:VSQKM:EPLT-AA¹⁷-LYY, SIPKAXX:VSQEL:EPLT-AA¹⁷-LYY, HVTKPTX:VSQKL:EPLT-AA¹⁷-LYY, YVPKPXX:VSQKL:EPLT-AA¹⁷-LYY, TVPKPXX:VSQQL:EPLT-AA¹⁷-LYY, AVPKAXX:VSQKL:EPLT-AA¹⁷-LYY, KVGKAXX:VSQKL:EPLT-AA¹⁷-LYY, KASKAXX:VSQKL:EPLT-AA¹⁷-LYY, GSAGPXX:VSQKM:EPLT-AA¹⁷-LYY, AAPASXX:VSQRL:EPLT-AA¹⁷-LYY, STPPTXX:VSQRL:EPLT-AA¹⁷-LYY, HVPKPXX:VSQKL:EPLT-AA¹⁷-LYY, RVPSTXX:VSQKT:EPLT-AA¹⁷-LYY, ASAAPXX:VSQAL:EPLT-AA¹⁷-LYY, ASASPXX:VSQDL:EPLT-AA¹⁷-LYY, KIPKAXX:VPTEL:EPLT-AA¹⁷-LYY, GIPEPXX:VPEKM:EPLT-AA¹⁷-LYY, SIPKAXX:VPTEL:EPLT-AA¹⁷-LYY, HVTKPTX:APTKL:EPLT-AA¹⁷-LYY, YVPKPXX:APTKL:EPLT-AA¹⁷-LYY, TVPKPXX:APTQL:EPLT-AA¹⁷-LYY, AVPKAXX:APTKL:EPLT-AA¹⁷-LYY, KVGKAXX:VPTKL:EPLT-AA¹⁷-LYY, KASKAXX:VPTKL:EPLT-AA¹⁷-LYY, GSAGPXX:TPTKM:EPLT-AA¹⁷-LYY, AAPASXX:VPARL:EPLT-AA¹⁷-LYY, STPPTXX:VPTRL:EPLT-AA¹⁷-LYY, HVPKPXX:APTKL:EPLT-AA¹⁷-LYY, RVPSTXX:APVKT:EPLT-AA¹⁷-LYY, ASAAPXX:VPQAL:EPLT-AA¹⁷-LYY, NDEGLEX:VPTEE:EPLT-AA¹⁷-LYY, NDEGLEX:VPTGQ:EPLT-AA¹⁷-LYY, SSVKXQP:SRVHH:EPLT-AA¹⁷-LYY, RNVQXRP:TQVQL:EPLT-AA¹⁷-LYY, KIPKAXX:VPQEL:EPLT-AA¹⁷-LYY, GIPEPXX:VPQKM:EPLT-AA¹⁷-LYY, SIPKAXX:VPQEL:EPLT-AA¹⁷-LYY, HVTKPTX:VPQKL:EPLT-AA¹⁷-LYY, YVPKPXX:VPQKL:EPLT-AA¹⁷-LYY, TVPKPXX:VPQQL:EPLT-AA¹⁷-LYY, AVPKAXX:VPQKL:EPLT-AA¹⁷-LYY, KVGKAXX:VPQKL:EPLT-AA¹⁷-LYY, KASKAXX:VPQKL:EPLT-AA¹⁷-LYY, GSAGPXX:VPQKM:EPLT-AA¹⁷-LYY, AAPASXX:VPQRL:EPLT-AA¹⁷-LYY, STPPTXX:VPQRL:EPLT-AA¹⁷-LYY, HVPKPXX:VPQKL:EPLT-AA¹⁷-LYY, RVPSTXX:VPQKT:EPLT-AA¹⁷-LYY, ASASPXX:VPQDL:EPLT-AA¹⁷-LYY, NDEGLEX:VPTGQ:SNIT-AA¹⁷-QIM, GIPEPXX:VPEKM:SNIT-AA¹⁷-QIM, HVTKPTX:APTKL:SNIT-AA¹⁷-QIM, YVPKPXX:APTKL:SNIT-AA¹⁷-QIM, TVPKPXX:APTQL:SNIT-AA¹⁷-QIM, AVPKAXX:APTKL:SNIT-AA¹⁷-QIM, GSAGPXX:TPTKM:SNIT-AA¹⁷-QIM, AAPASXX:VPARL:SNIT-AA¹⁷-QIM, HVPKPXX:APTKL:SNIT-AA¹⁷-QIM, RVPSTXX:APVKT:SNIT-AA¹⁷-QIM, ASAAPXX:VPQAL:SNIT-AA¹⁷-QIM, ASASPXX:VSQDL:SNIT-AA¹⁷-QIM, ASASPXX:VPQDL:SNIT-AA¹⁷-QIM, SSVKXQP:SRVHH:SNIT-AA¹⁷-QIM, RNVQXRP:TQVQL:SNIT-AA¹⁷-QIM, RNVQXRP:SRVQL:RSVK-AA¹⁷-AKV, KIPKAXX:VPTEL:RSVK-AA¹⁷-AKV, GIPEPXX:VPEKM:RSVK-AA¹⁷-AKV, SIPKAXX:VPTEL:RSVK-AA¹⁷-AKV, HVTKPTX:APTKL:RSVK-AA¹⁷-AKV, YVPKPXX:APTKL:RSVK-AA¹⁷-AKV, TVPKPXX:APTQL:RSVK-AA¹⁷-AKV, AVPKAXX:APTKL:RSVK-AA¹⁷-AKV, KVGKAXX:VPTKL:RSVK-AA¹⁷-AKV, KASKAXX:VPTKL:RSVK-AA¹⁷-AKV, GSAGPXX:TPTKM:RSVK-AA¹⁷-AKV, AAPASXX:VPARL:RSVK-AA¹⁷-AKV, STPPTXX:VPTRL:RSVK-AA¹⁷-AKV, HVPKPXX:APTKL:RSVK-AA¹⁷-AKV, RVPSTXX:APVKT:RSVK-AA¹⁷-AKV, ASAAPXX:VPQAL:RSVK-AA¹⁷-AKV, ASASPXX:VSQDL:RSVK-AA¹⁷-AKV, ASASPXX:VPQDL:RSVK-AA¹⁷-AKV, NDEGLEX:VPTEE:RSVK-AA¹⁷-AKV, NDEGLEX:VPTGQ:RSVK-AA¹⁷-AKV, RNVQXRP:TQVQL:RSVK-AA¹⁷-AKV, SSVKXQP:TQVHH:RPVQ-AA¹⁷-RKI, KIPKAXX:VPTEL:RPVQ-AA¹⁷-RKI, GIPEPXX:VPEKM:RPVQ-AA¹⁷-RKI, SIPKAXX:VPTEL:RPVQ-AA¹⁷-RKI, HVTKPTX:APTKL:RPVQ-AA¹⁷-RKI, YVPKPXX:APTKL:RPVQ-AA¹⁷-RKI, TVPKPXX:APTQL:RPVQ-AA¹⁷-RKI, AVPKAXX:APTKL:RPVQ-AA¹⁷-RKI, KVGKAXX:VPTKL:RPVQ-AA¹⁷-RKI, KASKAXX:VPTKL:RPVQ-AA¹⁷-RKI, GSAGPXX:TPTKM:RPVQ-AA¹⁷-RKI, AAPASXX:VPARL:RPVQ-AA¹⁷-RKI, STPPTXX:VPTRL:RPVQ-AA¹⁷-RKI, HVPKPXX:APTKL:RPVQ-AA¹⁷-RKI, RVPSTXX:APVKT:RPVQ-AA¹⁷-RKI, ASAAPXX:VPQAL:RPVQ-AA¹⁷-RKI, ASASPXX:VSQDL:RPVQ-AA¹⁷-RKI, ASASPXX:VPQDL:RPVQ-AA¹⁷-RKI, NDEGLEX:VPTEE:RPVQ-AA¹⁷-RKI, NDEGLEX:VPTGQ:RPVQ-AA¹⁷-RKI and SSVKXQP:SRVHH:RPVQ-AA17-RKI; and wherein AA¹⁷ is selected from the group consisting of G, A, V, L, I, P, F, M, W, T and S (in particular is selected from the group consisting of M, I, L, V and T).

[0329] In certain embodiments, PEP11 is a peptide with 3 amino acids of general formula AA¹⁸-AA¹⁹-AA²⁰; wherein AA¹⁸ is selected from the group consisting of L, V, Q, A and R; wherein AA¹⁹ is selected from the group consisting of F, W, H, Y, I and K; wherein AA²⁰ is selected from the group consisting of L, F, Y, K, I, V and M. In one particular example, PEP11 is selected from the group consisting of LYL, LFF, LYF, LYY, LYK, LYI, LFI, LYV, VYY, QIM, AKV and RKI.

[0330] In certain embodiments, PEP1 is selected from the group consisting of SAIS, SSLS, NAIS, SATS, SPIS, EPIS, SPIN, KPLS, EPLP, EPLT, SNIT, RSVK and RPVQ; PEP11 is selected from the group consisting of LYL, LFF, LYF, LYY, LYK, LYI, LFI, LYV, VYY, QIM, AKV and RKI; and the pair PEP1:PEP11 is selected from the group consisting of SAIS:LYL, SSLS:LFF, NAIS:LYF, SATS:LYY, SPIS:LYK, SPIS:LYI, SPIS:LFI, EPIS:LYL, SPIN:LYF, KPLS:LYV, EPLP:VYY, EPLT:LYY, SNIT:QIM, RSVK:AKV and RPVQ:RKI.

[0331] In one particular example, said GFR-binding compound is a peptide, a variant or analog thereof, or a peptidomimetic as defined herein, with (comprising, or exclusively consisting of, or constituted of) between 8 and 30 (in particular between 8-25 or between 8-22, more particularly between 18-22, even more particularly between 19-21 or 20) amino acids, having the following general formula (III) (hereinafter may also be referred to as compound (III) or peptide (III)):

AA¹-AA²-AA³-AA⁴-AA⁵-AA⁶-AA⁷-AA⁸-AA⁹-AA¹⁰-AA¹¹-AA¹²-AA¹³-AA¹⁴-AA¹⁵-AA¹⁶-AA¹⁷-AA¹⁸-AA¹⁹-AA²⁰ (III)

[0332] wherein AA¹-AA²-AA³-AA⁴-AA⁵-AA⁶-AA⁷ is PEP7 as defined herein; wherein AA¹³-AA¹⁴-AA¹⁵-AA¹⁶-AA¹⁷-AA¹⁸-AA¹⁹-AA²⁰ is PEP12 as defined herein; wherein AA⁸-AA⁹-AA¹⁰ is PEP3 as defined herein; wherein AA¹¹ and AA¹² are as defined herein; wherein AA¹ may be an N-terminal amino acid or a C-terminal amino acid; wherein AA²⁰ may be an N-terminal amino acid or a C-terminal amino acid.

[0333] In one most particular example, the RMSD value of the three dimensional (3D) atomic coordinates of said GFR-binding compound as defined herein with respect to PEPREF is 2.45 Å (Angstroms) or less, in particular is 2 Å or less, and more particularly is 1.79 Å or less, and wherein PEPREF is the set of 3D atomic coordinates already defined herein (hereinafter may be referred to as “wherein the RMSD is 2.45 Å or less” for the sake of conciseness).

[0334] In one example, said GFR-binding compound is a synthetic molecule as defined herein in the definition section.

[0335] In one particular example, said GFR-binding compound is a synthetic peptide, or a variant or analog thereof, or a peptidomimetic.

[0336] In one most particular example, said GFR-binding compound is a non-cyclic synthetic peptide.

[0337] In one example, a length of said GFR-binding compound, in solution, such as in a physiologically acceptable solvent such as water or PBS, is comprised between about 6 and about 20 nm, preferably between about 6 and about 16 nm, as determined using the standard «3D» procedure described above.

[0338] In one particular example, said GFR-binding compounds may be any one or a plurality of of peptides of SEQ ID NO: 1 to 4802

[0339] Cyclic GFR-Binding Compounds

[0340] In one example, said cyclic GFR-binding compound has a molecular weight of less than 5,000 Daltons. In one particular example, said cyclic GFR-binding compound has a molecular weight of less than 4,000 Daltons. In one particular example, said cyclic GFR-binding compound has a molecular weight comprised between 1,000 and 5,000 Daltons. In one particular example, said cyclic GFR-binding compound has a molecular weight comprised between 1,000 and 4,000 Daltons.

[0341] In one example, said cyclic GFR-binding compound has a molecular weight of less than 7,000 Daltons. In one example, said cyclic GFR-binding compound has a molecular weight of less than 6,000 Daltons. In one example, said cyclic GFR-binding compound has a molecular weight of less than 5,000 Daltons. In one particular example, said cyclic GFR-binding compound has a molecular weight comprised between 1,000 and 7,000 Daltons. In one particular example, said cyclic GFR-binding compound has a molecular weight comprised between 1,000 and 6,000 Daltons. In one particular example, said cyclic GFR-binding compound has a molecular weight comprised between 2,000 and 7,000 Daltons. In one particular example, said cyclic GFR-binding compound has a molecular weight comprised between 2,000 and 6,000 Daltons.

[0342] In one particular example, the growth factor receptor involved in the interaction with said cyclic GFR-binding compound is an epidermal growth factor receptor. In one particular example, the growth factor receptor involved in the interaction with said cyclic GFR-binding compound is a fibroblast growth factor receptor. In one particular example, the growth factor receptor involved in the interaction with said cyclic GFR-binding compound is a vascular endothelial growth factor receptor. In one particular example, the growth factor receptor involved in the interaction with said cyclic GFR-binding compound is a nerve growth factor receptor. In one particular example, the growth factor receptor involved in the interaction with said cyclic GFR-binding compound is a hepatocyte growth factor receptor. In one particular example, the growth factor receptor involved in the interaction with said cyclic GFR-binding compound is a somatomedin or insulin-like growth factor receptor. In one particular example, the growth factor receptor involved in the interaction with said cyclic GFR-binding compound is a platelet-derived growth factor receptor. In one particular example, the growth factor receptor involved in the interaction with said cyclic GFR-binding compound is a protein from the transforming growth factor beta (TGF-1) superfamily.

[0343] In one particular example, the growth factor receptor(s) involved in the interaction with said cyclic GFR-binding compound is (are) preferably selected from epidermal growth factor receptors, fibroblast growth factor receptors, vascular endothelial growth factor receptors, nerve growth factor receptors, hepatocyte growth factor receptors, somatomedin or insulin-like growth factor receptors, platelet-derived growth factor receptors, and transforming growth factor beta (TGF-1) superfamily proteins.

[0344] In one particular example, said cyclic GFR-binding compound is a peptide, or a variant or analog thereof, having growth factor receptor-binding capability or capabilities, with (exclusively consisting of, or constituted of) between 10-60 amino acids, in particular between 10-55 amino acids, more particularly between 15-60 amino acids, and even more particularly between 15-55 amino acids, or between 10-35 amino acids, in particular between 15-35 amino acids, more particularly between 10-30 amino acids, and even more particularly between 15-30 amino acids.

[0345] In one particular example, said cyclic GFR-binding compound is a cyclic peptidomimetic as defined herein, having growth factor receptor-binding capability or capabilities, comprising (consecutively or non consecutively) between 10-60 amino acids, in particular between 10-55 amino acids, more particularly between 15-60 amino acids, and even more particularly between 15-55 amino acids, or between 10-35 amino acids, in particular between 15-35 amino acids, more particularly between 10-30 amino acids, and even more particularly between 15-30 amino acids; wherein said cyclic GFR-binding compound has a molecular weight comprised between 1,000 and 7,000 Daltons (in particular, between 1,000 and 6,000 Da).

[0346] In one particular example, said cyclic GFR-binding compound is a cyclic peptidomimetic as defined herein, having growth factor receptor-binding capability or capabilities, comprising (consecutively or non consecutively) between 10-60 amino acids, in particular between 10-55 amino acids, more particularly between 15-60 amino acids, and even more particularly between 15-55 amino acids, or between 10-35 amino acids, in particular between 15-35 amino acids, more particularly between 10-30 amino acids, and even more particularly between 15-30 amino acids; and containing at least one peptide portion or fragment with between 5-20 amino acids (in particular containing one peptide portion or fragment with between 5-20 amino acids); wherein said cyclic GFR-binding compound has a molecular weight comprised between 1,000 and 7,000 Daltons (in particular, between 1,000 and 6,000 Da).

[0347] In one aspect, the present disclosure provides a cyclic GFR-binding compound, wherein said cyclic GFR-binding compound is a cyclic peptide, a variant or analog thereof, or a cyclic peptidomimetic as defined herein, having growth factor receptor-binding capability or capabilities, having a molecular weight of less than 7,000 Da, in particular of between 1,000 and 7,000 Da, more particularly of between 1,000 and 6,000 Da.

[0348] In one aspect, the present disclosure provides a cyclic GFR-binding compound, wherein said cyclic GFR-binding compound is a cyclic peptide, a variant or analog thereof, or a cyclic peptidomimetic as defined herein, having growth factor receptor-binding capability or capabilities, with between 10-60 (in particular between 15-60, more particularly between 10-55, and even more particularly between 15-55) amino acids or with between 10-35 (in particular between 15-35, more particularly between 10-30, and even more particularly between 15-30) amino acids, comprising a peptide with four amino acids (PEP1).

[0349] In one aspect, the present disclosure provides a cyclic GFR-binding compound, wherein said cyclic GFR-binding compound is a cyclic peptide, a variant or analog thereof, or a cyclic peptidomimetic as defined herein, with between 10-60 (in particular between 15-60, more particularly between 10-55, and even more particularly between 15-55) amino acids or with between 10-35 (in particular between 15-35, more particularly between 10-30, and even more particularly between 15-30) amino acids, comprising a peptide with eight amino acids (PEP12).

[0350] In one aspect, the present disclosure provides a cyclic GFR-binding compound, wherein said cyclic GFR-binding compound is a cyclic peptide, a variant or analog thereof, or a cyclic peptidomimetic as defined herein, with between 10-60 (in particular between 15-60, more particularly between 10-55, and even more particularly between 15-55) amino acids or with between 10-35 (in particular between 15-35, more particularly between 10-30, and even more particularly between 15-30) amino acids, comprising a peptide with four amino acids (PEP1); wherein said cyclic GFR-binding compound further comprises a peptide with three amino acids (PEP3).

[0351] In one aspect, the present disclosure provides a cyclic GFR-binding compound, wherein said cyclic GFR-binding compound is a cyclic peptide, a variant or analog thereof, or a cyclic peptidomimetic as defined herein, with between 10-60 (in particular between 15-60, more particularly between 10-55, and even more particularly between 15-55) amino acids or with between 10-35 (in particular between 15-35, more particularly between 10-30, and even more particularly between 15-30) amino acids, comprising a peptide with eight amino acids (PEP12); wherein said cyclic GFR-binding compound further comprises a peptide with three amino acids (PEP3).

[0352] In one aspect, the present disclosure provides a cyclic GFR-binding compound, wherein said cyclic GFR-binding compound is a cyclic peptide, a variant or analog thereof, or a cyclic peptidomimetic as defined herein, with between 10-60 (in particular between 15-60, more particularly between 10-55, and even more particularly between 15-55) amino acids or with between 10-35 (in particular between 15-35, more particularly between 10-30, and even more particularly between 15-30) amino acids, comprising a peptide with four amino acids (PEP1); wherein said cyclic GFR-binding compound further comprises a peptide with five amino acids (PEP5).

[0353] In one aspect, the present disclosure provides a cyclic GFR-binding compound, wherein said cyclic GFR-binding compound is a cyclic peptide, a variant or analog thereof, or a cyclic peptidomimetic as defined herein, with between 10-60 (in particular between 15-60, more particularly between 10-55, and even more particularly between 15-55) amino acids or with between 10-35 (in particular between 15-35, more particularly between 10-30, and even more particularly between 15-30) amino acids, comprising a peptide with eight amino acids (PEP12); wherein said cyclic GFR-binding compound further comprises a peptide with five amino acids (PEP5).

[0354] In one aspect, the present disclosure provides a cyclic GFR-binding compound, wherein said cyclic GFR-binding compound is a cyclic peptide, a variant or analog thereof, or a cyclic peptidomimetic as defined herein, with between 10-60 (in particular between 15-60, more particularly between 10-55, and even more particularly between 15-55) amino acids or with between 10-35 (in particular between 15-35, more particularly between 10-30, and even more particularly between 15-30) amino acids, comprising a peptide with four amino acids (PEP1); wherein said cyclic GFR-binding compound further comprises a peptide with between six and twelve amino acids (PEP9).

[0355] In one aspect, the present disclosure provides a cyclic GFR-binding compound, wherein said cyclic GFR-binding compound is a cyclic peptide, a variant or analog thereof, or a cyclic peptidomimetic as defined herein, with between 10-60 (in particular between 15-60, more particularly between 10-55, and even more particularly between 15-55) amino acids or with between 10-35 (in particular between 15-35, more particularly between 10-30, and even more particularly between 15-30) amino acids, comprising a peptide with eight amino acids (PEP12); wherein said cyclic GFR-binding compound further comprises a peptide with between six and twelve amino acids (PEP9).

[0356] In one aspect, the present disclosure provides a cyclic GFR-binding compound, wherein said cyclic GFR-binding compound is a cyclic peptide, a variant or analog thereof, or a cyclic peptidomimetic as defined herein, with between 10-60 (in particular between 15-60, more particularly between 10-55, and even more particularly between 15-55) amino acids or with between 10-35 (in particular between 15-35, more particularly between 10-30, and even more particularly between 15-30) amino acids, comprising a peptide with four amino acids (PEP1); wherein said cyclic GFR-binding compound further comprises a peptide with three amino acids (PEP3), and an amino acid or a peptide with between two and seven amino acids (PEP7).

[0357] In one aspect, the present disclosure provides a cyclic GFR-binding compound, wherein said cyclic GFR-binding compound is a cyclic peptide, a variant or analog thereof, or a cyclic peptidomimetic as defined herein, with between 10-60 (in particular between 15-60, more particularly between 10-55, and even more particularly between 15-55) amino acids or with between 10-35 (in particular between 15-35, more particularly between 10-30, and even more particularly between 15-30) amino acids, comprising a peptide with four amino acids (PEP12); wherein said cyclic GFR-binding compound further comprises a peptide with three amino acids (PEP3), and an amino acid or a peptide with between two and seven amino acids (PEP7).

[0358] In one aspect, the present disclosure provides a cyclic GFR-binding compound, wherein said cyclic GFR-binding compound is a cyclic peptide, a variant or analog thereof, or a cyclic peptidomimetic as defined herein, with between 10-60 (in particular between 15-60, more particularly between 10-55, and even more particularly between 15-55) amino acids or with between 10-35 (in particular between 15-35, more particularly between 10-30, and even more particularly between 15-30) amino acids, comprising a peptide with four amino acids (PEP1); wherein said cyclic GFR-binding compound further comprises a peptide with five amino acids (PEP5), and an amino acid or a peptide with between two and seven amino acids (PEP7).

[0359] In one aspect, the present disclosure provides a cyclic GFR-binding compound, wherein said cyclic GFR-binding compound is a cyclic peptide, a variant or analog thereof, or a cyclic peptidomimetic as defined herein, with between 10-60 (in particular between 15-60, more particularly between 10-55, and even more particularly between 15-55) amino acids or with between 10-35 (in particular between 15-35, more particularly between 10-30, and even more particularly between 15-30) amino acids, comprising a peptide with four amino acids (PEP12); wherein said cyclic GFR-binding compound further comprises a peptide with five amino acids (PEP5), and an amino acid or a peptide with between two and seven amino acids (PEP7).

[0360] In one aspect, the present disclosure provides a cyclic GFR-binding compound, wherein said cyclic GFR-binding compound is a cyclic peptide, a variant or analog thereof, or a cyclic peptidomimetic as defined herein, with between 10-60 (in particular between 15-60, more particularly between 10-55, and even more particularly between 15-55) amino acids or with between 10-35 (in particular between 15-35, more particularly between 10-30, and even more particularly between 15-30) amino acids, comprising a peptide, a variant or analog thereof, or a peptidomimetic having the following general formula (IIIa) (hereinafter may also be referred to as compound (IIIa) or peptide (IIIa)):

PEP(A)-LINKER (IIIa)

[0361] wherein one end of LINKER interacts covalently with one end of PEP(A); wherein PEP(A) comprises PEP1 or PEP12; wherein LINKER is a linear or branched organic divalent radical, moiety or compound having a molecular weight (Mw) comprised between 450 and 4,500 Daltons, in particular comprised between about 600 and about 4,500 Da, more particularly between about 600 and about 4,000 Da, and even more particularly between about 600 and about 3,500 Da.

[0362] In one aspect, the present disclosure provides a cyclic GFR-binding compound, wherein said cyclic GFR-binding compound is a cyclic peptide, a variant or analog thereof, or a cyclic peptidomimetic as defined herein, with between 10-60 (in particular between 15-60, more particularly between 10-55, and even more particularly between 15-55) amino acids or with between 10-35 (in particular between 15-35, more particularly between 10-30, and even more particularly between 15-30) amino acids, comprising a peptide, a variant or analog thereof, or a peptidomimetic having the following general formula (IIIb) (hereinafter may also be referred to as compound (IIIb) or peptide (IIIb)):

LINKER-PEP(A)-LINKER (IIIb)

[0363] wherein one end of a first LINKER interacts covalently with one end of PEP(A); wherein one end of a second LINKER interacts covalently with another end of PEP(A); wherein another end of a first LINKER interacts covalently with another end of a second LINKER; wherein PEP(A) comprises PEP1 or PEP12; wherein LINKER are independently a linear or branched organic divalent radical, moiety or compound having a molecular weight (Mw) comprised between 450 and 4,500 Daltons, in particular comprised between about 600 and about 4,500 Da, more particularly between about 600 and about 4,000 Da, and even more particularly between about 600 and about 3,500 Da.

[0364] In the present description, the molecular weight of LINKER refer to the calculated molecular weight prior to being connected to/reacted with any of the elements it is configured to connect to or react with e.g.

[0365] PEP(A), or any other groups defined herein.

[0366] In one aspect, the present disclosure provides a cyclic GFR-binding compound comprising compounds (IIIa) or (IIIb), wherein PEP(A) further comprises PEP3.

[0367] In one aspect, the present disclosure provides a cyclic GFR-binding compound comprising compounds (IIIa) or (IIIb), wherein PEP(A) further comprises PEP5.

[0368] In one aspect, the present disclosure provides a cyclic GFR-binding compound comprising compounds (IIIa) or (IIIb), wherein PEP(A) further comprises PEP9.

[0369] In one aspect, the present disclosure provides a cyclic GFR-binding compound comprising compounds (IIIa) or (IIIb), wherein PEP(A) further comprises PEP3 and PEP7.

[0370] In one aspect, the present disclosure provides a cyclic GFR-binding compound comprising compounds (IIIa) or (IIIb), wherein PEP(A) further comprises PEP5 and PEP7.

[0371] In one aspect, the present disclosure provides a cyclic GFR-binding compound, wherein said cyclic GFR-binding compound is a cyclic peptide, a variant or analog thereof, or a cyclic peptidomimetic as defined herein, with between 10-60 (in particular between 15-60, more particularly between 10-55, and even more particularly between 15-55) amino acids or with between 10-35 (in particular between 15-35, more particularly between 10-30, and even more particularly between 15-30) amino acids, comprising a peptide, a variant or analog thereof, or a peptidomimetic having the following general formula (IVa) (hereinafter may also be referred to as compound (IVa) or peptide (IVa)):

PEP(C)-PEP12-LINKER (IVa)

[0372] wherein LINKER is a linear or branched organic divalent radical, moiety or compound having a molecular weight (Mw) comprised between 450 and 4,500 Daltons, in particular comprised between about 600 and about 4,500 Da, more particularly between about 600 and about 4,000 Da, and even more particularly between about 600 and about 3,500 Da; wherein PEP12 is a peptide with 8 amino acids of formula PEP1-AA¹⁷-PEP11 as defined herein; wherein PEP2 is a peptide with five amino acids as already defined herein; wherein one end of PEP(C) interacts covalently with PEP12 via one end of PEP1; wherein one end of LINKER interacts covalently with one end of PEP12 via one end of PEP11; wherein PEP(C) is a peptide with at least 5 amino acids, in particular a peptide with between 5 and 12 amino acids.

[0373] In one aspect, the present disclosure provides a cyclic GFR-binding compound, wherein said cyclic GFR-binding compound is a cyclic peptide, a variant or analog thereof, or a cyclic peptidomimetic as defined herein, with between 10-60 (in particular between 15-60, more particularly between 10-55, and even more particularly between 15-55) amino acids or with between 10-35 (in particular between 15-35, more particularly between 10-30, and even more particularly between 15-30) amino acids, comprising a peptide, a variant or analog thereof, or a peptidomimetic having the following general formula (IVb) (hereinafter may also be referred to as compound (IVb) or peptide (IVb)):

LINKER-PEP(C)-PEP12-LINKER (IVb)

[0374] wherein LINKER are independently a linear or branched organic divalent radical, moiety or compound having a molecular weight (Mw) comprised between 450 and 4,500 Daltons, in particular comprised between about 600 and about 4,500 Da, more particularly between about 600 and about 4,000 Da, and even more particularly between about 600 and about 3,500 Da; wherein PEP12 is a peptide with 8 amino acids of formula PEP1-AA¹⁷-PEP11 as defined herein; wherein PEP2 is a peptide with five amino acids as already defined herein; wherein one end of PEP(C) interacts covalently with PEP12 via one end of PEP1; wherein one end of a first LINKER interacts covalently with one end of PEP12 via one end of PEP11; wherein one end of a second LINKER interacts covalently with another end of PEP(C); wherein another end of a first LINKER interacts covalently with another end of a second LINKER; wherein PEP(C) is a peptide with at least 5 amino acids, in particular a peptide with between 5 and 12 amino acids.

[0375] In one aspect, the present disclosure provides a cyclic GFR-binding compound comprising compound (IVa) or (IVb), wherein PEP(C) comprises PEP3.

[0376] In one aspect, the present disclosure provides a cyclic GFR-binding compound comprising compound (IVa) or (IVb), wherein PEP(C) comprises PEP5. In one particular example, PEP(C) is PEP5.

[0377] In one aspect, the present disclosure provides a cyclic GFR-binding compound comprising compound (IVa) or (IVb), wherein PEP(C) comprises PEP9. In one particular example, PEP(C) is PEP9.

[0378] In one aspect, the present disclosure provides a cyclic GFR-binding compound comprising compound (IVa) or (IVb), wherein PEP(C) comprises PEP3 and PEP7.

[0379] In one aspect, the present disclosure provides a cyclic GFR-binding compound comprising compound (IVa) or (IVb), wherein PEP(C) comprises PEP5 and PEP7.

[0380] In one aspect, the present disclosure provides a cyclic GFR-binding compound comprising compound (IVa) or (IVb), wherein PEP(C) is PEP5 or PEP9.

[0381] In one aspect, the present disclosure provides a cyclic GFR-binding compound, wherein said cyclic GFR-binding compound is a cyclic peptide, a variant or analog thereof, or a cyclic peptidomimetic as defined herein, with between 10-60 (in particular between 15-60, more particularly between 10-55, and even more particularly between 15-55) amino acids or with between 10-35 (in particular between 15-35, more particularly between 10-30, and even more particularly between 15-30) amino acids, comprising a peptide, a variant or analog thereof, or a peptidomimetic having the following general formula (Va) (hereinafter may also be referred to as compound (Va) or peptide (Va)):

PEP7-PEP5-PEP12-LINKER (Va)

[0382] wherein LINKER is a linear or branched organic divalent radical, moiety or compound having a molecular weight (Mw) comprised between 450 and 4,500 Daltons, in particular comprised between about 600 and about 4,500 Da, more particularly between about 600 and about 4,000 Da, and even more particularly between about 600 and about 3,500 Da; wherein PEP12 is a peptide with 8 amino acids of formula PEP1-AA¹⁷-PEP11 as defined herein; wherein PEP5 is a peptide with five amino acids as already defined herein; wherein PEP7 an amino acid or a peptide with between two and seven amino acids as already defined herein; wherein one end of LINKER interacts covalently with one end of PEP12 via AA²⁰; wherein one end of PEP5 interacts covalently with another end of PEP12 via AA¹²; wherein another end of PEP5 interacts covalently with one end of PEP7 via AA⁸.

[0383] In one aspect, the present disclosure provides a cyclic GFR-binding compound, wherein said cyclic GFR-binding compound is a cyclic peptide, a variant or analog thereof, or a cyclic peptidomimetic as defined herein, with between 10-60 (in particular between 15-60, more particularly between 10-55, and even more particularly between 15-55) amino acids or with between 10-35 (in particular between 15-35, more particularly between 10-30, and even more particularly between 15-30) amino acids, comprising a peptide, a variant or analog thereof, or a peptidomimetic having the following general formula (Vb) (hereinafter may also be referred to as compound (Vb) or peptide (Vb)):

LINKER-PEP7-PEP5-PEP12-LINKER (Vb)

[0384] wherein LINKER are independently a linear or branched organic divalent radical, moiety or compound having a molecular weight (Mw) comprised between 450 and 4,500 Daltons, in particular comprised between about 600 and about 4,500 Da, more particularly between about 600 and about 4,000 Da, and even more particularly between about 600 and about 3,500 Da; wherein PEP12 is a peptide with 8 amino acids of formula PEP1-AA¹⁷-PEP11 as defined herein; wherein PEP5 is a peptide with five amino acids as already defined herein; wherein PEP7 an amino acid or a peptide with between two and seven amino acids as already defined herein; wherein one end of PEP5 interacts covalently with another end of PEP12 via AA¹²; wherein another end of PEP5 interacts covalently with one end of PEP7 via AA⁸; wherein one end of a first LINKER interacts covalently with one end of PEP12 via AA²⁰; wherein one end of a second LINKER interacts covalently with another end of PEP7; wherein another end of a first LINKER interacts covalently with another end of a second LINKER.

[0385] In one aspect, the present disclosure provides a cyclic GFR-binding compound, wherein said cyclic GFR-binding compound is a cyclic peptide, a variant or analog thereof, or a cyclic peptidomimetic as defined herein, with between 10-60 (in particular between 15-60, more particularly between 10-55, and even more particularly between 15-55) amino acids or with between 10-35 (in particular between 15-35, more particularly between 10-30, and even more particularly between 15-30) amino acids, comprising a peptide, a variant or analog thereof, or a peptidomimetic having the following general formula (VIa) (hereinafter may also be referred to as compound (VIa) or peptide (VIa)):

AA¹-AA²-AA³-AA⁴-AA⁵-AA⁶-AA⁷-AA⁸-AA⁹-AA¹⁰-AA¹¹-AA¹²-AA¹³-AA¹⁴-AA¹⁵-AA¹⁶-AA¹⁷-AA¹⁸-AA¹⁹-AA²⁰-LINKER (VIa)

[0386] wherein LINKER is a linear or branched organic divalent radical, moiety or compound having a molecular weight (Mw) comprised between 450 and 4,500 Daltons, in particular comprised between about 600 and about 4,500 Da, more particularly between about 600 and about 4,000 Da, and even more particularly between about 600 and about 3,500 Da; wherein AA¹-AA²-AA³-AA⁴-AA⁵-AA⁶-AA⁷ is PEP7 as defined herein; wherein AA¹³-AA¹⁴-AA¹⁵-AA¹⁶-AA¹⁷-AA¹⁸-AA¹⁹-AA²⁰ is PEP12 as defined herein; wherein AA⁸-AA⁹-AA¹⁰ is PEP3 as defined herein; wherein AA¹¹ and AA¹² are as defined herein; wherein one end of LINKER interacts covalently with AA²⁰; wherein AA¹ may be an N-terminal amino acid or a C-terminal amino acid; wherein AA²⁰ may be an N-terminal amino acid or a C-terminal amino acid.

[0387] In one aspect, the present disclosure provides a cyclic GFR-binding compound, wherein said cyclic GFR-binding compound is a cyclic peptide, a variant or analog thereof, or a cyclic peptidomimetic as defined herein, with between 10-60 (in particular between 15-60, more particularly between 10-55, and even more particularly between 15-55) amino acids or with between 10-35 (in particular between 15-35, more particularly between 10-30, and even more particularly between 15-30) amino acids, comprising a peptide, a variant or analog thereof, or a peptidomimetic having the following general formula (VIb) (hereinafter may also be referred to as compound (VIb) or peptide (VIb)):

LINKER-AA¹-AA²-AA³-AA⁴-AA⁵-AA⁶-AA⁷-AA⁸-AA⁹-AA¹⁰-AA¹¹-AA¹²-AA¹³-AA¹⁴-AA¹⁵-AA¹⁶-AA¹⁷-AA¹⁸-AA¹⁹-AA²⁰-LINKER (VIb)

[0388] wherein LINKER are independently a linear or branched organic divalent radical, moiety or compound having a molecular weight (Mw) comprised between 450 and 4,500 Daltons, in particular comprised between about 600 and about 4,500 Da, more particularly between about 600 and about 4,000 Da, and even more particularly between about 600 and about 3,500 Da; wherein AA¹-AA²-AA³-AA⁴-AA⁵-AA⁶-AA⁷ is PEP7 as defined herein; wherein AA¹³-AA¹⁴-AA¹⁵-AA¹⁶-AA¹⁷-AA¹⁸-AA¹⁹-AA²⁰ is PEP12 as defined herein; wherein AA⁸-AA⁹-AA¹⁰ is PEP3 as defined herein; wherein AA¹ and AA¹² are as defined herein; wherein one end of a first LINKER interacts covalently with AA²⁰; wherein one end of a second LINKER interacts covalently with AA¹; wherein another end of a first LINKER interacts covalently with another end of a second LINKER; wherein one end of the first LINKER may be an N-terminal amino acid or a C-terminal amino acid.

[0389] In one aspect, the present disclosure provides a cyclic GFR-binding compound, wherein said cyclic GFR-binding compound is a cyclic peptide, a variant or analog thereof, or a cyclic peptidomimetic as defined herein, with between 10-60 (in particular between 10-55, more particularly between 15-60, and even more particularly between 15-55) amino acids, or between 10-35 (in particular between 10-30, more particularly between 15-35, and even more particularly between 15-30) amino acids, comprising two LINKERs.

[0390] In one aspect, the present disclosure provides a cyclic GFR-binding compound, wherein said cyclic GFR-binding compound is a cyclic peptide, a variant or analog thereof, or a cyclic peptidomimetic as defined herein, with between 10-60 (in particular between 15-60, more particularly between 10-55, and even more particularly between 15-55) amino acids or with between 10-35 (in particular between 15-35, more particularly between 10-30, and even more particularly between 15-30) amino acids, having any one of the following schematic general formulae (VII) to (XX) (hereinafter may also be referred to as compounds

[chemical structure]

[chemical structure]

[0391] wherein LINKER is a linear or branched organic divalent radical, moiety or compound having a molecular weight (Mw) comprised between 450 and 4,500 Daltons, in particular comprised between about 600 and about 4,500 Da, more particularly between about 600 and about 4,000 Da, and even more particularly between about 600 and about 3,500 Da; wherein PEP12 is a peptide with 8 amino acids of formula PEP1-AA¹⁷-PEP11 as defined herein; wherein PEP5 is a peptide with five amino acids as already defined herein; wherein PEP7 an amino acid or a peptide with between two and seven amino acids as already defined herein; wherein PEP9 is a peptide with between six and twelve amino acids; wherein curved lines represents covalent bonds between LINKER and PEP1 to PEP12. Curved lines' lengths may not be representative of the actual relative distance between the LINKERs and PEP1 to PEP12.

[0392] In one aspect, the present disclosure provides a cyclic GFR-binding compound, wherein said cyclic GFR-binding compound is a cyclic peptide, a variant or analog thereof, or a cyclic peptidomimetic as defined herein, with between 10-60 (in particular between 15-60, more particularly between 10-55, and even more particularly between 15-55) amino acids or with between 10-35 (in particular between 15-35, more particularly between 10-30, and even more particularly between 15-30) amino acids, having any one of the following schematic general formulae (XXI) to (XXIII) (hereinafter may also be referred to as compounds (XXI) to (XXIII) or peptides (XXI) to (XXIII)):

[chemical structure]

[0393] wherein LINKER is a linear or branched organic divalent radical, moiety or compound having a molecular weight (Mw) comprised between 450 and 4,500 Daltons, in particular comprised between about 600 and about 4,500 Da, more particularly between about 600 and about 4,000 Da, and even more particularly between about 600 and about 3,500 Da; wherein AA¹³-AA¹⁴-AA¹⁵-AA¹⁶-AA¹⁷-AA¹⁸-AA¹⁹-AA²⁰ is PEP12 as defined herein; wherein AA⁸-AA⁹-AA¹⁰ is PEP3 as defined herein; wherein AA¹ and AA¹² are as defined herein; wherein one end of LINKER interacts covalently with AA¹⁶ or AA²⁰; wherein another end of LINKER interacts covalently with AA⁸ or AA¹³; wherein curved lines represents covalent bonds between LINKER and AAs. Curved lines' lengths may not be representative of the actual relative distance between the LINKER and the AAs.

[0394] In certain embodiments, PEP1 is selected from the group consisting of SAIS, SSLS, NAIS, SATS, SPIS, EPIS, SPIN, KPLS, EPLP, EPLT, SNIT, RSVK and RPVQ.

[0395] In certain embodiments, PEP3 is selected from the group consisting of VPT, VPE, APT, TPT, VPA, APV, VPQ, VSQ, SRV and TQV.

[0396] In certain embodiments, PEP5 is a peptide of general formula PEP3-AA¹¹-AA¹²; wherein PEP3 is selected from the group consisting of VPT, VPE, APT, TPT, VPA, APV, VPQ, VSQ, SRV and TQV; wherein AA¹¹ is selected from the group consisting of E, K, Q, R, A, D, G and H; and wherein AA¹² is selected from the group consisting of L, M, T, E, Q and H. In one particular example, PEP5 is selected from the group consisting of VPTEL, VPEKM, APTKL, APTQL, VPTKL, TPTKM, VPARL, VPTRL, APVKT, VPQAL, VSQDL, VPQDL, VPTEE, VPTGQ, SRVHH and TQVQL.

[0397] In certain embodiments, PEP7 is an amino acid or a peptide with between two and seven amino acids of general formula AA¹-AA²-AA³-AA⁴-AA⁵-AA⁶-AA⁷; wherein wherein AA¹, AA², AA³, AA⁴, and AA⁵ are independently absent or AA^{I} as defined herein; wherein AA⁶ is absent or selected from the group consisting of S, T, C, E, Q, P and R; wherein AA⁷ is absent or is selected from the group consisting of S, T, C, E, Q, P and R, and wherein at least one of AA¹, AA², AA³, AA⁴, AA⁵, AA⁶ or AA⁷ is not absent. In one particular example, PEP7 is selected from the group consisting of KIPKAXX, GIPEPXX, SIPKAXX, HVTKPTX, YVPKPXX, TVPKPXX, AVPKAXX, KVGKAXX, KASKAXX, GSAGPXX, AAPASXX, STPPTXX, HVPKPXX, RVPSTXX, ASAAPXX, ASASPXX, NDEGLEX, SSVKXQP and RNVQXRP, wherein X is C or S throughout the present description.

[0398] In certain embodiments, PEP9 is a peptide of general formula PEP7-PEP5; wherein PEP5 is a peptide of formula PEP3-AA¹¹-AA¹²; wherein PEP3 is selected from the group consisting of VPT, VPE, APT, TPT, VPA, APV, VPQ, VSQ, SRV and TQV; wherein AA¹ is selected from the group consisting of E, K, Q, R, A, D, G and H; and wherein AA¹² is selected from the group consisting of L, M, T, E, Q and H; wherein PEP7 is an amino acid or a peptide with between two and seven amino acids of general formula AA¹-AA²-AA³-AA⁴-AA⁵-AA⁶-AA⁷; wherein AA¹, AA², AA³, AA⁴, and AA⁵ are independently absent or AA^{I} as defined herein; wherein AA⁶ is absent or selected from the group consisting of S, T, C, E, Q, P and R; wherein AA⁷ is absent or is selected from the group consisting of S, T, C, E, Q, P and R. In one particular example, PEP9 is selected from the group consisting of KIPKAXXVPTEL, GIPEPXXVPEKM, SIPKAXXVPTEL, HVTKPTXAPTKL, YVPKPXXAPTKL, TVPKPXXAPTQL, AVPKAXXAPTKL, KVGKAXXVPTKL, KASKAXXVPTKL, GSAGPXXTPTKM, AAPASXXVPARL, STPPTXXVPTRL, HVPKPXXAPTKL, RVPSTXXAPVKT, ASAAPXXVPQAL, ASASPXXVSQDL, ASASPXXVPQDL, NDEGLEXVPTEE, NDEGLEXVPTGQ, SSVKXQPSRVHH and RNVQXRPTQVQL, wherein X is C or S throughout the present description.

[0399] In certain embodiments, PEP12 is a peptide of general formula PEP1-AA¹⁷-PEP11; wherein AA¹⁷ is selected from the group consisting of G, A, V, L, I, P, F, M, W, T and S (in particular is selected from the group consisting of M, I, L, V and T); wherein PEP1 is selected from the group consisting of SAIS, SSLS, NAIS, SATS, SPIS, EPIS, SPIN, KPLS, EPLP, EPLT, SNIT, RSVK and RPVQ.

[0400] In certain embodiments, PEP11 is a peptide with 3 amino acids of general formula AA¹⁸-AA¹⁹-AA²⁰; wherein AA¹⁸ is selected from the group consisting of L, V, Q, A and R; wherein AA¹⁹ is selected from the group consisting of F, W, H, Y, I and K; wherein AA²⁰ is selected from the group consisting of L, F, Y, K, I, V and M. In one particular example, PEP11 is selected from the group consisting of LYL, LFF, LYF, LYY, LYK, LYI, LFI, LYV, VYY, QIM, AKV and RKI.

[0401] In certain embodiments, PEP7 is selected from the group consisting of KIPKAXX, GIPEPXX, SIPKAXX, HVTKPTX, YVPKPXX, TVPKPXX, AVPKAXX, KVGKAXX, KASKAXX, GSAGPXX, AAPASXX, STPPTXX, HVPKPXX, RVPSTXX, ASAAPXX, ASASPXX, NDEGLEX, SSVKXQP and RNVQXRP; wherein PEP8 is selected from the group consisting of GXGXR, SXAXR, SXGXH, AXGXH, XGXR, EXGXR, RXGXS, AXGXR, SXGXR, XGXL, XKXS, KXEXR, QXEXR, LEXAXA and LAXKXE; and wherein the pair PEP7:PEP8 is selected from the group consisting of KIPKAXX:GXGXR, GIPEPXX:SXAXR, SIPKAXX:GXGXR, HVTKPTX:SXGXH, YVPKPXX:SXGXH, TVPKPXX:AXGXH, AVPKAXX:AXGXH, KVGKAXX:XGXR, KASKAXX:EXGXR, GSAGPXX:RXGXS, AAPASXX:AXGXR, STPPTXX:SXGXR, HVPKPXX:SXGXH, RVPSTXX:XGXL, ASAAPXX:XKXS, ASASPXX:XKXS, NDEGLEX:KXEXR, NDEGLEX:QXEXR, SSVKXQP:LEXAXA and RNVQXRP:LAXKXE.

[0402] In certain embodiments, PEP1 is selected from the group consisting of SAIS, SSLS, NAIS, SATS, SPIS, EPIS, SPIN, KPLS, EPLP, EPLT, SNIT, RSVK and RPVQ; PEP11 is selected from the group consisting of LYL, LFF, LYF, LYY, LYK, LYI, LFI, LYV, VYY, QIM, AKV and RKI; and the pair PEP1:PEP11 is selected from the group consisting of SAIS:LYL, SSLS:LFF, NAIS:LYF, SATS:LYY, SPIS:LYK, SPIS:LYI, SPIS:LFI, EPIS:LYL, SPIN:LYF, KPLS:LYV, EPLP:VYY, EPLT:LYY, SNIT:QIM, RSVK:AKV and RPVQ:RKI.

[0403] In particular, in certain embodiments, the pair PEP3:PEP1 is selected from the group consisting of VPT:SAIS, VPE:SAIS, APT:SAIS, TPT:SAIS, VPA:SAIS, APV:SAIS, VPQ:SAIS, VSQ:SAIS, SRV:SAIS, TQV:SAIS, VPE:SSLS, VPT:SSLS, APT:SSLS, TPT:SSLS, VPA:SSLS, APV:SSLS, VPQ:SSLS, VSQ:SSLS, SRV:SSLS, TQV:SSLS, APT:NAIS, VPT:NAIS, VPE:NAIS, TPT:NAIS, VPA:NAIS, APV:NAIS, VPQ:NAIS, VSQ:NAIS, SRV:NAIS, TQV:NAIS, APT:SATS, VPT:SATS, VPE:SATS, TPT:SATS, VPA:SATS, APV:SATS, VPQ:SATS, VSQ:SATS, SRV:SATS, TQV:SATS, VPT:SPIS, VPE:SPIS, APT:SPIS, TPT:SPIS, VPA:SPIS, APV:SPIS, VPQ:SPIS, VSQ:SPIS, SRV:SPIS, TQV:SPIS, VPT:EPIS, VPE:EPIS, APT:EPIS, TPT:EPIS, VPA:EPIS, APV:EPIS, VPQ:EPIS, VSQ:EPIS, SRV:EPIS, TQV:EPIS, TPT:SPIN, VPT:SPIN, VPE:SPIN, APT:SPIN, VPA:SPIN, APV:SPIN, VPQ:SPIN, VSQ:SPIN, SRV:SPIN, TQV:SPIN, APV:KPLS, VPT:KPLS, VPE:KPLS, APT:KPLS, TPT:KPLS, VPA:KPLS, VPQ:KPLS, VSQ:KPLS, SRV:KPLS, TQV:KPLS, VPQ:EPLP, VPT:EPLP, VPE:EPLP, APT:EPLP, TPT:EPLP, VPA:EPLP, APV:EPLP, VSQ:EPLP, SRV:EPLP, TQV:EPLP, VSQ:EPLT, VPT:EPLT, VPE:EPLT, APT:EPLT, TPT:EPLT, VPA:EPLT, APV:EPLT, VPQ:EPLT, SRV:EPLT, TQV:EPLT, VPT:SNIT, VPE:SNIT, APT:SNIT, TPT:SNIT, VPA:SNIT, APV:SNIT, VPQ:SNIT, VSQ:SNIT, SRV:SNIT, TQV:SNIT, SRV:RSVK, VPT:RSVK, VPE:RSVK, APT:RSVK, TPT:RSVK, VPA:RSVK, APV:RSVK, VPQ:RSVK, VSQ:RSVK, TQV:RSVK, TQV:RPVQ, VPT:RPVQ, VPE:RPVQ, APT:RPVQ, TPT:RPVQ, VPA:RPVQ, APV:RPVQ, VPQ:RPVQ, VSQ:RPVQ and SRV:RPVQ.

[0404] In particular, in certain embodiments, the pair PEP5:PEP1 is selected from the group consisting of VPTKM:SAIS, VPTKL:SAIS, VPTQL:SAIS, VPTRL:SAIS, VPTKT:SAIS, VPTAL:SAIS, VPTDL:SAIS, VPEKM:SAIS, APTKL:SAIS, APTQL:SAIS, TPTKM:SAIS, VPARL:SAIS, APVKT:SAIS, VPQAL:SAIS, VSQDL:SAIS, VPQDL:SAIS, SRVHH:SAIS, TQVQL:SAIS, VPEEL:SSLS, VPEKL:SSLS, VPEQL:SSLS, VPEKM:SSLS, VPERL:SSLS, VPEKT:SSLS, VPEAL:SSLS, VPEDL:SSLS, VPTEL:SSLS, APTKL:SSLS, APTQL:SSLS, VPTKL:SSLS, TPTKM:SSLS, VPARL:SSLS, VPTRLSSLS, APVKT:SSLS, VPQAL:SSLS, VSQDL:SSLS, VPQDL:SSLS, VPTEE:SSLS, VPTGQSSLS, SRVHH:SSLS, TQVQL:SSLS, APTEL:NAIS, APTKM:NAIS, APTKL:NAIS, APTRL:NAIS, APTKT:NAIS, APTAL:NAIS, APTDL:NAIS, VPTEL:NAIS, VPEKM:NAIS, VPTKL:NAIS, TPTKM:NAIS, VPARL:NAIS, VPTRL:NAIS, APVKT:NAIS, VPQAL:NAIS, VSQDL:NAIS, VPQDL:NAIS, VPTEE:NAIS, VPTGQ:NAIS, SRVHH:NAIS, TQVQL:NAIS, APTEL:SATS, APTKM:SATS, APTKL:SATS, APTQL:SATS, APTRL:SATS, APTKT:SATS, APTAL:SATS, APTDL:SATS, VPTEL:SATS, VPEKM:SATS, VPTKL:SATS, TPTKM:SATS, VPARL:SATS, VPTRL:SATS, APVKT:SATS, VPQAL:SATS, VSQDL:SATS, VPQDL:SATS, VPTEE:SATS, VPTGQ:SATS, SRVHH:SATS, TQVQL:SATS, VPTEL:SPIS, VPTKM:SPIS, VPTKL:SPIS, VPTQL:SPIS, VPTRL:SPIS, VPTKT:SPIS, VPTAL:SPIS, VPTDL:SPIS, VPEKM:SPIS, APTKL:SPIS, APTQL:SPIS, TPTKM:SPIS, VPARL:SPIS, APVKT:SPIS, VPQAL:SPIS, VSQDL:SPIS, VPQDL:SPIS, SRVHH:SPIS, TQVQL:SPIS, VPTEL:EPIS, VPTKM:EPIS, VPTKL:EPIS, VPTQL:EPIS, VPTRL:EPIS, VPTKT:EPIS, VPTAL:EPIS, VPTDL:EPIS, VPEKM:EPIS, APTKL:EPIS, APTQL:EPIS, TPTKM:EPIS, VPARL:EPIS, APVKT:EPIS, VPQAL:EPIS, VSQDL:EPIS, VPQDL:EPIS, SRVHH:EPIS, TQVQL:EPIS, TPTEL:SPIN, TPTKM:SPIN, TPTKL:SPIN, TPTQL:SPIN, TPTRL:SPIN, TPTKT:SPIN, TPTAL:SPIN, TPTDL:SPIN, VPTEL:SPIN, VPEKM:SPIN, APTKL:SPIN, APTQL:SPIN, VPTKL:SPIN, VPARL:SPIN, VPTRL:SPIN, APVKT:SPIN, VPQAL:SPIN, VSQDL:SPIN, VPQDL:SPIN, VPTEE:SPIN, VPTGQ:SPIN, SRVHH:SPIN, TQVQL:SPIN, VPAEL:SPIS, VPAKM:SPIS, VPAKL:SPIS, VPAQL:SPIS, VPAKT:SPIS, VPAAL:SPIS, VPADL:SPIS, VPTEE:SPIS, VPTGQ:SPIS, APVEL:KPLS, APVKM:KPLS, APVKL:KPLS, APVQL:KPLS, APVRL:KPLS, APVAL:KPLS, APVDL:KPLS, VPTEL:KPLS, VPEKM:KPLS, APTKL:KPLS, APTQL:KPLS, VPTKL:KPLS, TPTKM:KPLS, VPARL:KPLS, VPTRL:KPLS, VPQAL:KPLS, VSQDL:KPLS, VPQDL:KPLS, VPTEE:KPLS, VPTGQ:KPLS, SRVHH:KPLS, TQVQL:KPLS, VPQEL:EPLP, VPQKM:EPLP, VPQKL:EPLP, VPQQL:EPLP, VPQRL:EPLP, VPQKT:EPLP, VPQDL:EPLP, VPTEL:EPLP, VPEKM:EPLP, APTKL:EPLP, APTQL:EPLP, VPTKL:EPLP, TPTKM:EPLP, VPARL:EPLP, VPTRL:EPLP, APVKT:EPLP, VSQDL:EPLP, VPTEE:EPLP, VPTGQ:EPLP, SRVHH:EPLP, TQVQL:EPLP, VSQEL:EPLT, VSQKM:EPLT, VSQKL:EPLT, VSQQL:EPLT, VSQRL:EPLT, VSQKT:EPLT, VSQAL:EPLT, VSQDL:EPLT, VPTEL:EPLT, VPEKM:EPLT, APTKL:EPLT, APTQL:EPLT, VPTKL:EPLT, TPTKM:EPLT, VPARL:EPLT, VPTRL:EPLT, APVKT:EPLT, VPQAL:EPLT, VPTEE:EPLT, VPTGQ:EPLT, SRVHH:EPLT, TQVQL:EPLT, VPQEL:EPLT, VPQKM:EPLT, VPQKL:EPLT, VPQQL:EPLT, VPQRL:EPLT, VPQKT:EPLT, VPQDL:EPLT, VPTGQ:SNIT, VPEKM:SNIT, APTKL:SNIT, APTQL:SNIT, TPTKM:SNIT, VPARL:SNIT, APVKT:SNIT, VPQAL:SNIT, VSQDL:SNIT, VPQDL:SNIT, SRVHH:SNIT, TQVQL:SNIT, SRVQL:RSVK, VPTEL:RSVK, VPEKM:RSVK, APTKL:RSVK, APTQL:RSVK, VPTKL:RSVK, TPTKM:RSVK, VPARL:RSVK, VPTRL:RSVK, APVKT:RSVK, VPQAL:RSVK, VSQDL:RSVK, VPQDL:RSVK, VPTEE:RSVK, VPTGQ:RSVK, TQVQL:RSVK, TQVHH:RPVQ, VPTEL:RPVQ, VPEKM:RPVQ, APTKL:RPVQ, APTQL:RPVQ, VPTKL:RPVQ, TPTKM:RPVQ, VPARL:RPVQ, VPTRL:RPVQ, APVKT:RPVQ, VPQAL:RPVQ, VSQDL:RPVQ, VPQDL:RPVQ, VPTEE:RPVQ, VPTGQ:RPVQ and SRVHH:RPVQ.

[0405] In particular, in certain embodiments, the pair PEP7:PEP1 is selected from the group consisting of GIPEPXX:SAIS, HVTKPTX:SAIS, YVPKPXX:SAIS, TVPKPXX:SAIS, AVPKAXX:SAIS, KVGKAXX:SAIS, KASKAXX:SAIS, GSAGPXX:SAIS, AAPASXX:SAIS, STPPTXX:SAIS, HVPKPXX:SAIS, RVPSTXX:SAIS, ASAAPXX:SAIS, ASASPXX:SAIS, SSVKXQP:SAIS, RNVQXRP:SAIS, KIPKAXX:SSLS, SIPKAXX:SSLS, HVTKPTX:SSLS, YVPKPXX:SSLS, TVPKPXX:SSLS, AVPKAXX:SSLS, KVGKAXX:SSLS, KASKAXX:SSLS, GSAGPXX:SSLS, AAPASXX:SSLS, STPPTXX:SSLS, HVPKPXX:SSLS, RVPSTXX:SSLS, ASAAPXX:SSLS, ASASPXX:SSLS, NDEGLEX:SSLS, SSVKXQP:SSLS, RNVQXRP:SSLS, KIPKAXX:NAIS, GIPEPXX:NAIS, SIPKAXX:NAIS, AVPKAXX:NAIS, KVGKAXX:NAIS, KASKAXX:NAIS, GSAGPXX:NAIS, AAPASXX:NAIS, STPPTXX:NAIS, RVPSTXX:NAIS, ASAAPXX:NAIS, ASASPXX:NAIS, NDEGLEX:NAIS, SSVKXQP:NAIS, RNVQXRP:NAIS, KIPKAXX:SATS, GIPEPXX:SATS, SIPKAXX:SATS, HVTKPTX:SATS, YVPKPXX:SATS, TVPKPXX:SATS, KVGKAXX:SATS, KASKAXX:SATS, GSAGPXX:SATS, AAPASXX:SATS, STPPTXX:SATS, HVPKPXX:SATS, RVPSTXX:SATS, ASAAPXX:SATS, ASASPXX:SATS, NDEGLEX:SATS, SSVKXQP:SATS, RNVQXRP:SATS, KIPKAXX:SPIS, GIPEPXX:SPIS, SIPKAXX:SPIS, HVTKPTX:SPIS, YVPKPXX:SPIS, TVPKPXX:SPIS, AVPKAXX:SPIS, KASKAXX:SPIS, GSAGPXX:SPIS, AAPASXX:SPIS, STPPTXX:SPIS, HVPKPXX:SPIS, RVPSTXX:SPIS, ASAAPXX:SPIS, ASASPXX:SPIS, SSVKXQP:SPIS, RNVQXRP:SPIS, KIPKAXX:EPIS, GIPEPXX:EPIS, SIPKAXX:EPIS, HVTKPTX:EPIS, YVPKPXX:EPIS, TVPKPXX:EPIS, AVPKAXX:EPIS, KVGKAXX:EPIS, GSAGPXX:EPIS, AAPASXX:EPIS, STPPTXX:EPIS, HVPKPXX:EPIS, RVPSTXX:EPIS, ASAAPXX:EPIS, ASASPXX:EPIS, SSVKXQP:EPIS, RNVQXRP:EPIS, KIPKAXX:SPIN, GIPEPXX:SPIN, SIPKAXX:SPIN, HVTKPTX:SPIN, YVPKPXX:SPIN, TVPKPXX:SPIN, AVPKAXX:SPIN, KVGKAXX:SPIN, KASKAXX:SPIN, AAPASXX:SPIN, STPPTXX:SPIN, HVPKPXX:SPIN, RVPSTXX:SPIN, ASAAPXX:SPIN, ASASPXX:SPIN, NDEGLEX:SPIN, SSVKXQP:SPIN, RNVQXRP:SPIN, KVGKAXX:SPIS, NDEGLEX:SPIS, KIPKAXX:KPLS, GIPEPXX:KPLS, SIPKAXX:KPLS, HVTKPTX:KPLS, YVPKPXX:KPLS, TVPKPXX:KPLS, AVPKAXX:KPLS, KVGKAXX:KPLS, KASKAXX:KPLS, GSAGPXX:KPLS, AAPASXX:KPLS, STPPTXX:KPLS, HVPKPXX:KPLS, ASAAPXX:KPLS, ASASPXX:KPLS, NDEGLEX:KPLS, SSVKXQP:KPLS, RNVQXRP:KPLS, KIPKAXX:EPLP, GIPEPXX:EPLP, SIPKAXX:EPLP, HVTKPTX:EPLP, YVPKPXX:EPLP, TVPKPXX:EPLP, AVPKAXX:EPLP, KVGKAXX:EPLP, KASKAXX:EPLP, GSAGPXX:EPLP, AAPASXX:EPLP, STPPTXX:EPLP, HVPKPXX:EPLP, RVPSTXX:EPLP, ASASPXX:EPLP, NDEGLEX:EPLP, SSVKXQP:EPLP, RNVQXRP:EPLP, KIPKAXX:EPLT, GIPEPXX:EPLT, SIPKAXX:EPLT, HVTKPTX:EPLT, YVPKPXX:EPLT, TVPKPXX:EPLT, AVPKAXX:EPLT, KVGKAXX:EPLT, KASKAXX:EPLT, GSAGPXX:EPLT, AAPASXX:EPLT, STPPTXX:EPLT, HVPKPXX:EPLT, RVPSTXX:EPLT, ASAAPXX:EPLT, ASASPXX:EPLT, NDEGLEX:EPLT, SSVKXQP:EPLT, RNVQXRP:EPLT, NDEGLEX:SNIT, GIPEPXX:SNIT, HVTKPTX:SNIT, YVPKPXX:SNIT, TVPKPXX:SNIT, AVPKAXX:SNIT, GSAGPXX:SNIT, AAPASXX:SNIT, HVPKPXX:SNIT, RVPSTXX:SNIT, ASAAPXX:SNIT, ASASPXX:SNIT, SSVKXQP:SNIT, RNVQXRP:SNIT, RNVQXRP:RSVK, KIPKAXX:RSVK, GIPEPXX:RSVK, SIPKAXX:RSVK, HVTKPTX:RSVK, YVPKPXX:RSVK, TVPKPXX:RSVK, AVPKAXX:RSVK, KVGKAXX:RSVK, KASKAXX:RSVK, GSAGPXX:RSVK, AAPASXX:RSVK, STPPTXX:RSVK, HVPKPXX:RSVK, RVPSTXX:RSVK, ASAAPXX:RSVK, ASASPXX:RSVK, NDEGLEX:RSVK, SSVKXQP:RPVQ, KIPKAXX:RPVQ, GIPEPXX:RPVQ, SIPKAXX:RPVQ, HVTKPTX:RPVQ, YVPKPXX:RPVQ, TVPKPXX:RPVQ, AVPKAXX:RPVQ, KVGKAXX:RPVQ, KASKAXX:RPVQ, GSAGPXX:RPVQ, AAPASXX:RPVQ, STPPTXX:RPVQ, HVPKPXX:RPVQ, RVPSTXX:RPVQ, ASAAPXX:RPVQ, ASASPXX:RPVQ and NDEGLEX:RPVQ.

[0406] In particular, in certain embodiments, the pair PEP9:PEP1 is selected from the group consisting of GIPEPXXVPTKM:SAIS, HVTKPTXVPTKL:SAIS, YVPKPXXVPTKL:SAIS, TVPKPXXVPTQL:SAIS, AVPKAXXVPTKL:SAIS, KVGKAXXVPTKL:SAIS, KASKAXXVPTKL:SAIS, GSAGPXXVPTKM:SAIS, AAPASXXVPTRL:SAIS, STPPTXXVPTRL:SAIS, HVPKPXXVPTKL:SAIS, RVPSTXXVPTKT:SAIS, ASAAPXXVPTAL:SAIS, ASASPXXVPTDL:SAIS, GIPEPXXVPEKM:SAIS, HVTKPTXAPTKL:SAIS, YVPKPXXAPTKL:SAIS, TVPKPXXAPTQL:SAIS, AVPKAXXAPTKL:SAIS, GSAGPXXTPTKM:SAIS, AAPASXXVPARL:SAIS, HVPKPXXAPTKL:SAIS, RVPSTXXAPVKT:SAIS, ASAAPXXVPQAL:SAIS, ASASPXXVSQDL:SAIS, ASASPXXVPQDL:SAIS, SSVKXQPSRVHH:SAIS, RNVQXRPTQVQL:SAIS, KIPKAXXVPEEL:SSLS, SIPKAXXVPEEL:SSLS, HVTKPTXVPEKL:SSLS, YVPKPXXVPEKL:SSLS, TVPKPXXVPEQL:SSLS, AVPKAXXVPEKL:SSLS, KVGKAXXVPEKL:SSLS, KASKAXXVPEKL:SSLS, GSAGPXXVPEKM:SSLS, AAPASXXVPERL:SSLS, STPPTXXVPERL:SSLS, HVPKPXXVPEKL:SSLS, RVPSTXXVPEKT:SSLS, ASAAPXXVPEAL:SSLS, ASASPXXVPEDL:SSLS, KIPKAXXVPTEL:SSLS, SIPKAXXVPTEL:SSLS, HVTKPTXAPTKL:SSLS, YVPKPXXAPTKL:SSLS, TVPKPXXAPTQL:SSLS, AVPKAXXAPTKL:SSLS, KVGKAXXVPTKL:SSLS, KASKAXXVPTKL:SSLS, GSAGPXXTPTKM:SSLS, AAPASXXVPARL:SSLS, STPPTXXVPTRL:SSLS, HVPKPXXAPTKL:SSLS, RVPSTXXAPVKT:SSLS, ASAAPXXVPQAL:SSLS, ASASPXXVSQDL:SSLS, ASASPXXVPQDL:SSLS, NDEGLEXVPTEE:SSLS, NDEGLEXVPTGQ:SSLS, SSVKXQPSRVHH:SSLS, RNVQXRPTQVQL:SSLS, KIPKAXXAPTEL:NAIS, GIPEPXXAPTKM:NAIS, SIPKAXXAPTEL:NAIS, AVPKAXXAPTKL:NAIS, KVGKAXXAPTKL:NAIS, KASKAXXAPTKL:NAIS, GSAGPXXAPTKM:NAIS, AAPASXXAPTRL:NAIS, STPPTXXAPTRL:NAIS, RVPSTXXAPTKT:NAIS, ASAAPXXAPTAL:NAIS, ASASPXXAPTDL:NAIS, KIPKAXXVPTEL:NAIS, GIPEPXXVPEKM:NAIS, SIPKAXXVPTEL:NAIS, KVGKAXXVPTKL:NAIS, KASKAXXVPTKL:NAIS, GSAGPXXTPTKM:NAIS, AAPASXXVPARL:NAIS, STPPTXXVPTRL:NAIS, RVPSTXXAPVKT:NAIS, ASAAPXXVPQAL:NAIS, ASASPXXVSQDL:NAIS, ASASPXXVPQDL:NAIS, NDEGLEXVPTEE:NAIS, NDEGLEXVPTGQ:NAIS, SSVKXQPSRVHH:NAIS, RNVQXRPTQVQL:NAIS, KIPKAXXAPTEL:SATS, GIPEPXXAPTKM:SATS, SIPKAXXAPTEL:SATS, HVTKPTXAPTKL:SATS, YVPKPXXAPTKL:SATS, TVPKPXXAPTQL:SATS, KVGKAXXAPTKL:SATS, KASKAXXAPTKL:SATS, GSAGPXXAPTKM:SATS, AAPASXXAPTRL:SATS, STPPTXXAPTRL:SATS, HVPKPXXAPTKL:SATS, RVPSTXXAPTKT:SATS, ASAAPXXAPTAL:SATS, ASASPXXAPTDL:SATS, KIPKAXXVPTEL:SATS, GIPEPXXVPEKM:SATS, SIPKAXXVPTEL:SATS, KVGKAXXVPTKL:SATS, KASKAXXVPTKL:SATS, GSAGPXXTPTKM:SATS, AAPASXXVPARL:SATS, STPPTXXVPTRL:SATS, RVPSTXXAPVKT:SATS, ASAAPXXVPQAL:SATS, ASASPXXVSQDL:SATS, ASASPXXVPQDL:SATS, NDEGLEXVPTEE:SATS, NDEGLEXVPTGQ:SATS, SSVKXQPSRVHH:SATS, RNVQXRPTQVQL:SATS, KIPKAXXVPTEL:SPIS, GIPEPXXVPTKM:SPIS, SIPKAXXVPTEL:SPIS, HVTKPTXVPTKL:SPIS, YVPKPXXVPTKL:SPIS, TVPKPXXVPTQL:SPIS, AVPKAXXVPTKL:SPIS, KASKAXXVPTKL:SPIS, GSAGPXXVPTKM:SPIS, AAPASXXVPTRL:SPIS, STPPTXXVPTRL:SPIS, HVPKPXXVPTKL:SPIS, RVPSTXXVPTKT:SPIS, ASAAPXXVPTAL:SPIS, ASASPXXVPTDL:SPIS, GIPEPXXVPEKM:SPIS, HVTKPTXAPTKL:SPIS, YVPKPXXAPTKL:SPIS, TVPKPXXAPTQL:SPIS, AVPKAXXAPTKL:SPIS, GSAGPXXTPTKM:SPIS, AAPASXXVPARL:SPIS, HVPKPXXAPTKL:SPIS, RVPSTXXAPVKT:SPIS, ASAAPXXVPQAL:SPIS, ASASPXXVSQDL:SPIS, ASASPXXVPQDL:SPIS, SSVKXQPSRVHH:SPIS, RNVQXRPTQVQL:SPIS, KIPKAXXVPTEL:EPIS, GIPEPXXVPTKM:EPIS, SIPKAXXVPTEL:EPIS, HVTKPTXVPTKL:EPIS, YVPKPXXVPTKL:EPIS, TVPKPXXVPTQL:EPIS, AVPKAXXVPTKL:EPIS, KVGKAXXVPTKL:EPIS, GSAGPXXVPTKM:EPIS, AAPASXXVPTRL:EPIS, STPPTXXVPTRL:EPIS, HVPKPXXVPTKL:EPIS, RVPSTXXVPTKT:EPIS, ASAAPXXVPTAL:EPIS, ASASPXXVPTDL:EPIS, GIPEPXXVPEKM:EPIS, HVTKPTXAPTKL:EPIS, YVPKPXXAPTKL:EPIS, TVPKPXXAPTQL:EPIS, AVPKAXXAPTKL:EPIS, GSAGPXXTPTKM:EPIS, AAPASXXVPARL:EPIS, HVPKPXXAPTKL:EPIS, RVPSTXXAPVKT:EPIS, ASAAPXXVPQAL:EPIS, ASASPXXVSQDL:EPIS, ASASPXXVPQDL:EPIS, SSVKXQPSRVHH:EPIS, RNVQXRPTQVQL:EPIS, KIPKAXXTPTEL:SPIN, GIPEPXXTPTKM:SPIN, SIPKAXXTPTEL:SPIN, HVTKPTXTPTKL:SPIN, YVPKPXXTPTKL:SPIN, TVPKPXXTPTQL:SPIN, AVPKAXXTPTKL:SPIN, KVGKAXXTPTKL:SPIN, KASKAXXTPTKL:SPIN, AAPASXXTPTRL:SPIN, STPPTXXTPTRL:SPIN, HVPKPXXTPTKL:SPIN, RVPSTXXTPTKT:SPIN, ASAAPXXTPTAL:SPIN, ASASPXXTPTDL:SPIN, KIPKAXXVPTEL:SPIN, GIPEPXXVPEKM:SPIN, SIPKAXXVPTEL:SPIN, HVTKPTXAPTKL:SPIN, YVPKPXXAPTKL:SPIN, TVPKPXXAPTQL:SPIN, AVPKAXXAPTKL:SPIN, KVGKAXXVPTKL:SPIN, KASKAXXVPTKL:SPIN, AAPASXXVPARL:SPIN, STPPTXXVPTRL:SPIN, HVPKPXXAPTKL:SPIN, RVPSTXXAPVKT:SPIN, ASAAPXXVPQAL:SPIN, ASASPXXVSQDL:SPIN, ASASPXXVPQDL:SPIN, NDEGLEXVPTEE:SPIN, NDEGLEXVPTGQ:SPIN, SSVKXQPSRVHH:SPIN, RNVQXRPTQVQL:SPIN, KIPKAXXVPAEL:SPIS, GIPEPXXVPAKM:SPIS, SIPKAXXVPAEL:SPIS, HVTKPTXVPAKL:SPIS, YVPKPXXVPAKL:SPIS, TVPKPXXVPAQL:SPIS, AVPKAXXVPAKL:SPIS, KVGKAXXVPAKL:SPIS, KASKAXXVPAKL:SPIS, GSAGPXXVPAKM:SPIS, STPPTXXVPARL:SPIS, HVPKPXXVPAKL:SPIS, RVPSTXXVPAKT:SPIS, ASAAPXXVPAAL:SPIS, ASASPXXVPADL:SPIS, KVGKAXXVPTKL:SPIS, NDEGLEXVPTEE:SPIS, NDEGLEXVPTGQ:SPIS, KIPKAXXAPVEL:KPLS, GIPEPXXAPVKM:KPLS, SIPKAXXAPVEL:KPLS, HVTKPTXAPVKL:KPLS, YVPKPXXAPVKL:KPLS, TVPKPXXAPVQL:KPLS, AVPKAXXAPVKL:KPLS, KVGKAXXAPVKL:KPLS, KASKAXXAPVKL:KPLS, GSAGPXXAPVKM:KPLS, AAPASXXAPVRL:KPLS, STPPTXXAPVRL:KPLS, HVPKPXXAPVKL:KPLS, ASAAPXXAPVAL:KPLS, ASASPXXAPVDL:KPLS, KIPKAXXVPTEL:KPLS, GIPEPXXVPEKM:KPLS, SIPKAXXVPTEL:KPLS, HVTKPTXAPTKL:KPLS, YVPKPXXAPTKL:KPLS, TVPKPXXAPTQL:KPLS, AVPKAXXAPTKL:KPLS, KVGKAXXVPTKL:KPLS, KASKAXXVPTKL:KPLS, GSAGPXXTPTKM:KPLS, AAPASXXVPARL:KPLS, STPPTXXVPTRL:KPLS, HVPKPXXAPTKL:KPLS, ASAAPXXVPQAL:KPLS, ASASPXXVSQDL:KPLS, ASASPXXVPQDL:KPLS, NDEGLEXVPTEE:KPLS, NDEGLEXVPTGQ:KPLS, SSVKXQPSRVHH:KPLS, RNVQXRPTQVQL:KPLS, KIPKAXXVPQEL:EPLP, GIPEPXXVPQKM:EPLP, SIPKAXXVPQEL:EPLP, HVTKPTXVPQKL:EPLP, YVPKPXXVPQKL:EPLP, TVPKPXXVPQQL:EPLP, AVPKAXXVPQKL:EPLP, KVGKAXXVPQKL:EPLP, KASKAXXVPQKL:EPLP, GSAGPXXVPQKM:EPLP, AAPASXXVPQRL:EPLP, STPPTXXVPQRL:EPLP, HVPKPXXVPQKL:EPLP, RVPSTXXVPQKT:EPLP, ASASPXXVPQDL:EPLP, KIPKAXXVPTEL:EPLP, GIPEPXXVPEKM:EPLP, SIPKAXXVPTEL:EPLP, HVTKPTXAPTKL:EPLP, YVPKPXXAPTKL:EPLP, TVPKPXXAPTQL:EPLP, AVPKAXXAPTKL:EPLP, KVGKAXXVPTKL:EPLP, KASKAXXVPTKL:EPLP, GSAGPXXTPTKM:EPLP, AAPASXXVPARL:EPLP, STPPTXXVPTRL:EPLP, HVPKPXXAPTKL:EPLP, RVPSTXXAPVKT:EPLP, ASASPXXVSQDL:EPLP, NDEGLEXVPTEE:EPLP, NDEGLEXVPTGQ:EPLP, SSVKXQPSRVHH:EPLP, RNVQXRPTQVQL:EPLP, KIPKAXXVSQEL:EPLT, GIPEPXXVSQKM:EPLT, SIPKAXXVSQEL:EPLT, HVTKPTXVSQKL:EPLT, YVPKPXXVSQKL:EPLT, TVPKPXXVSQQL:EPLT, AVPKAXXVSQKL:EPLT, KVGKAXXVSQKL:EPLT, KASKAXXVSQKL:EPLT, GSAGPXXVSQKM:EPLT, AAPASXXVSQRL:EPLT, STPPTXXVSQRL:EPLT, HVPKPXXVSQKL:EPLT, RVPSTXXVSQKT:EPLT, ASAAPXXVSQAL:EPLT, ASASPXXVSQDL:EPLT, KIPKAXXVPTEL:EPLT, GIPEPXXVPEKM:EPLT, SIPKAXXVPTEL:EPLT, HVTKPTXAPTKL:EPLT, YVPKPXXAPTKL:EPLT, TVPKPXXAPTQL:EPLT, AVPKAXXAPTKL:EPLT, KVGKAXXVPTKL:EPLT, KASKAXXVPTKL:EPLT, GSAGPXXTPTKM:EPLT, AAPASXXVPARL:EPLT, STPPTXXVPTRL:EPLT, HVPKPXXAPTKL:EPLT, RVPSTXXAPVKT:EPLT, ASAAPXXVPQAL:EPLT, NDEGLEXVPTEE:EPLT, NDEGLEXVPTGQ:EPLT, SSVKXQPSRVHH:EPLT, RNVQXRPTQVQL:EPLT, KIPKAXXVPQEL:EPLT, GIPEPXXVPQKM:EPLT, SIPKAXXVPQEL:EPLT, HVTKPTXVPQKL:EPLT, YVPKPXXVPQKL:EPLT, TVPKPXXVPQQL:EPLT, AVPKAXXVPQKL:EPLT, KVGKAXXVPQKL:EPLT, KASKAXXVPQKL:EPLT, GSAGPXXVPQKM:EPLT, AAPASXXVPQRL:EPLT, STPPTXXVPQRL:EPLT, HVPKPXXVPQKL:EPLT, RVPSTXXVPQKT:EPLT, ASASPXXVPQDL:EPLT, NDEGLEXVPTGQ:SNIT, GIPEPXXVPEKM:SNIT, HVTKPTXAPTKL:SNIT, YVPKPXXAPTKL:SNIT, TVPKPXXAPTQL:SNIT, AVPKAXXAPTKL:SNIT, GSAGPXXTPTKM:SNIT, AAPASXXVPARL:SNIT, HVPKPXXAPTKL:SNIT, RVPSTXXAPVKT:SNIT, ASAAPXXVPQAL:SNIT, ASASPXXVSQDL:SNIT, ASASPXXVPQDL:SNIT, SSVKXQPSRVHH:SNIT, RNVQXRPTQVQL:SNIT, RNVQXRPSRVQL:RSVK, KIPKAXXVPTEL:RSVK, GIPEPXXVPEKM:RSVK, SIPKAXXVPTEL:RSVK, HVTKPTXAPTKL:RSVK, YVPKPXXAPTKL:RSVK, TVPKPXXAPTQL:RSVK, AVPKAXXAPTKL:RSVK, KVGKAXXVPTKL:RSVK, KASKAXXVPTKL:RSVK, GSAGPXXTPTKM:RSVK, AAPASXXVPARL:RSVK, STPPTXXVPTRL:RSVK, HVPKPXXAPTKL:RSVK, RVPSTXXAPVKT:RSVK, ASAAPXXVPQAL:RSVK, ASASPXXVSQDL:RSVK, ASASPXXVPQDL:RSVK, NDEGLEXVPTEE:RSVK, NDEGLEXVPTGQ:RSVK, RNVQXRPTQVQL:RSVK, SSVKXQPTQVHH:RPVQ, KIPKAXXVPTEL:RPVQ, GIPEPXXVPEKM:RPVQ, SIPKAXXVPTEL:RPVQ, HVTKPTXAPTKL:RPVQ, YVPKPXXAPTKL:RPVQ, TVPKPXXAPTQL:RPVQ, AVPKAXXAPTKL:RPVQ, KVGKAXXVPTKL:RPVQ, KASKAXXVPTKL:RPVQ, GSAGPXXTPTKM:RPVQ, AAPASXXVPARL:RPVQ, STPPTXXVPTRL:RPVQ, HVPKPXXAPTKL:RPVQ, RVPSTXXAPVKT:RPVQ, ASAAPXXVPQAL:RPVQ, ASASPXXVSQDL:RPVQ, ASASPXXVPQDL:RPVQ, NDEGLEXVPTEE:RPVQ, NDEGLEXVPTGQ:RPVQ and SSVKXQPSRVHH:RPVQ.

[0407] In particular, in certain embodiments, the pair PEP3:PEP12 is selected from the group consisting of VPT:SAIS-AA¹⁷-LYL, VPE:SAIS-AA¹⁷-LYL, APT:SAIS-AA¹⁷-LYL, TPT:SAIS-AA¹⁷-LYL, VPA:SAIS-AA¹⁷-LYL, APV:SAIS-AA¹⁷-LYL, VPQ:SAIS-AA¹⁷-LYL, VSQ:SAIS-AA¹⁷-LYL, SRV:SAIS-AA¹⁷-LYL, TQV:SAIS-AA¹⁷-LYL, VPE:SSLS-AA¹⁷-LFF, VPT:SSLS-AA¹⁷-LFF, APT:SSLS-AA¹⁷-LFF, TPT:SSLS-AA¹⁷-LFF, VPA:SSLS-AA¹⁷-LFF, APV:SSLS-AA¹⁷-LFF, VPQ:SSLS-AA¹⁷-LFF, VSQ:SSLS-AA¹⁷-LFF, SRV:SSLS-AA¹⁷-LFF, TQV:SSLS-AA¹⁷-LFF, APT:NAIS-AA¹⁷-LYF, VPT:NAIS-AA¹⁷-LYF, VPE:NAIS-AA¹⁷-LYF, TPT:NAIS-AA¹⁷-LYF, VPA:NAIS-AA¹⁷-LYF, APV:NAIS-AA¹⁷-LYF, VPQ:NAIS-AA¹⁷-LYF, VSQ:NAIS-AA¹⁷-LYF, SRV:NAIS-AA¹⁷-LYF, TQV:NAIS-AA¹⁷-LYF, APT:SATS-AA¹⁷-LYY, VPT:SATS-AA¹⁷-LYY, VPE:SATS-AA¹⁷-LYY, TPT:SATS-AA¹⁷-LYY, VPA:SATS-AA¹⁷-LYY, APV:SATS-AA¹⁷-LYY, VPQ:SATS-AA¹⁷-LYY, VSQ:SATS-AA¹⁷-LYY, SRV:SATS-AA¹⁷-LYY, TQV:SATS-AA¹⁷-LYY, VPT:SPIS-AA¹⁷-LYK, VPE:SPIS-AA¹⁷-LYK, APT:SPIS-AA¹⁷-LYK, TPT:SPIS-AA¹⁷-LYK, VPA:SPIS-AA¹⁷-LYK, APV:SPIS-AA¹⁷-LYK, VPQ:SPIS-AA¹⁷-LYK, VSQ:SPIS-AA¹⁷-LYK, SRV:SPIS-AA¹⁷-LYK, TQV:SPIS-AA¹⁷-LYK, VPT:EPIS-AA¹⁷-LYL, VPE:EPIS-AA¹⁷-LYL, APT:EPIS-AA¹⁷-LYL, TPT:EPIS-AA¹⁷-LYL, VPA:EPIS-AA¹⁷-LYL, APV:EPIS-AA¹⁷-LYL, VPQ:EPIS-AA¹⁷-LYL, VSQ:EPIS-AA¹⁷-LYL, SRV:EPIS-AA¹⁷-LYL, TQV:EPIS-AA¹⁷-LYL, TPT:SPIN-AA¹⁷-LYF, VPT:SPIN-AA¹⁷-LYF, VPE:SPIN-AA¹⁷-LYF, APT:SPIN-AA¹⁷-LYF, VPA:SPIN-AA¹⁷-LYF, APV:SPIN-AA¹⁷-LYF, VPQ:SPIN-AA¹⁷-LYF, VSQ:SPIN-AA¹⁷-LYF, SRV:SPIN-AA¹⁷-LYF, TQV:SPIN-AA¹⁷-LYF, VPA:SPIS-AA¹⁷-LYI, VPT:SPIS-AA¹⁷-LYI, VPE:SPIS-AA¹⁷-LYI, APT:SPIS-AA¹⁷-LYI, TPT:SPIS-AA¹⁷-LYI, APV:SPIS-AA¹⁷-LYI, VPQ:SPIS-AA¹⁷-LYI, VSQ:SPIS-AA¹⁷-LYI, SRV:SPIS-AA¹⁷-LYI, TQV:SPIS-AA¹⁷-LYI, VPT:SPIS-AA¹⁷-LFI, VPE:SPIS-AA¹⁷-LFI, APT:SPIS-AA¹⁷-LFI, TPT:SPIS-AA¹⁷-LFI, VPA:SPIS-AA¹⁷-LFI, APV:SPIS-AA¹⁷-LFI, VPQ:SPIS-AA¹⁷-LFI, VSQ:SPIS-AA¹⁷-LFI, SRV:SPIS-AA¹⁷-LFI, TQV:SPIS-AA¹⁷-LFI, APV:KPLS-AA¹⁷-LYV, VPT:KPLS-AA¹⁷-LYV, VPE:KPLS-AA¹⁷-LYV, APT:KPLS-AA¹⁷-LYV, TPT:KPLS-AA¹⁷-LYV, VPA:KPLS-AA¹⁷-LYV, VPQ:KPLS-AA¹⁷-LYV, VSQ:KPLS-AA¹⁷-LYV, SRV:KPLS-AA¹⁷-LYV, TQV:KPLS-AA¹⁷-LYV, VPQ:EPLP-AA¹⁷-VYY, VPT:EPLP-AA¹⁷-VYY, VPE:EPLP-AA¹⁷-VYY, APT:EPLP-AA¹⁷-VYY, TPT:EPLP-AA¹⁷-VYY, VPA:EPLP-AA¹⁷-VYY, APV:EPLP-AA¹⁷-VYY, VSQ:EPLP-AA¹⁷-VYY, SRV:EPLP-AA¹⁷-VYY, TQV:EPLP-AA¹⁷-VYY, VSQ:EPLT-AA¹⁷-LYY, VPT:EPLT-AA¹⁷-LYY, VPE:EPLT-AA¹⁷-LYY, APT:EPLT-AA¹⁷-LYY, TPT:EPLT-AA¹⁷-LYY, VPA:EPLT-AA¹⁷-LYY, APV:EPLT-AA¹⁷-LYY, VPQ:EPLT-AA¹⁷-LYY, SRV:EPLT-AA¹⁷-LYY, TQV:EPLT-AA¹⁷-LYY, VPT:SNIT-AA¹⁷-QIM, VPE:SNIT-AA¹⁷-QIM, APT:SNIT-AA¹⁷-QIM, TPT:SNIT-AA¹⁷-QIM, VPA:SNIT-AA¹⁷-QIM, APV:SNIT-AA¹⁷-QIM, VPQ:SNIT-AA¹⁷-QIM, VSQ:SNIT-AA¹⁷-QIM, SRV:SNIT-AA¹⁷-QIM, TQV:SNIT-AA¹⁷-QIM, SRV:RSVK-AA¹⁷-AKV, VPT:RSVK-AA¹⁷-AKV, VPE:RSVK-AA¹⁷-AKV, APT:RSVK-AA¹⁷-AKV, TPT:RSVK-AA¹⁷-AKV, VPA:RSVK-AA¹⁷-AKV, APV:RSVK-AA¹⁷-AKV, VPQ:RSVK-AA¹⁷-AKV, VSQ:RSVK-AA¹⁷-AKV, TQV:RSVK-AA¹⁷-AKV, TQV:RPVQ-AA¹⁷-RKI, VPT:RPVQ-AA¹⁷-RKI, VPE:RPVQ-AA¹⁷-RKI, APT:RPVQ-AA¹⁷-RKI, TPT:RPVQ-AA¹⁷-RKI, VPA:RPVQ-AA¹⁷-RKI, APV:RPVQ-AA¹⁷-RKI, VPQ:RPVQ-AA¹⁷-RKI, VSQ:RPVQ-AA¹⁷-RKI and SRV:RPVQ-AA¹⁷-RKI; and wherein AA¹⁷ is selected from the group consisting of G, A, V, L, I, P, F, M, W, T and S (in particular is selected from the group consisting of M, I, L, V and T).

[0408] In particular, in certain embodiments, the pair PEP12:PEP5 is selected from the group consisting of VPTKM:SAIS-AA¹⁷-LYL, VPTKL:SAIS-AA¹⁷-LYL, VPTQL:SAIS-AA¹⁷-LYL, VPTRL:SAIS-AA¹⁷-LYL, VPTKT:SAIS-AA¹⁷-LYL, VPTAL:SAIS-AA¹⁷-LYL, VPTDL:SAIS-AA¹⁷-LYL, VPEKM:SAIS-AA¹⁷-LYL, APTKL:SAIS-AA¹⁷-LYL, APTQL:SAIS-AA¹⁷-LYL, TPTKM:SAIS-AA¹⁷-LYL, VPARL:SAIS-AA¹⁷-LYL, APVKT:SAIS-AA¹⁷-LYL, VPQAL:SAIS-AA¹⁷-LYL, VSQDL:SAIS-AA¹⁷-LYL, VPQDL:SAIS-AA¹⁷-LYL, SRVHH:SAIS-AA¹⁷-LYL, TQVQL:SAIS-AA¹⁷-LYL, VPEEL:SSLS-AA¹⁷-LFF, VPEKL:SSLS-AA¹⁷-LFF, VPEQL:SSLS-AA¹⁷-LFF, VPEKM:SSLS-AA¹⁷-LFF, VPERL:SSLS-AA¹⁷-LFF, VPEKT:SSLS-AA¹⁷-LFF, VPEAL:SSLS-AA¹⁷-LFF, VPEDL:SSLS-AA¹⁷-LFF, VPTEL:SSLS-AA¹⁷-LFF, APTKL:SSLS-AA¹⁷-LFF, APTQL:SSLS-AA¹⁷-LFF, VPTKL:SSLS-AA¹⁷-LFF, TPTKM:SSLS-AA¹⁷-LFF, VPARL:SSLS-AA¹⁷-LFF, VPTRL:SSLS-AA¹⁷-LFF, APVKT:SSLS-AA¹⁷-LFF, VPQAL:SSLS-AA¹⁷-LFF, VSQDL:SSLS-AA¹⁷-LFF, VPQDL:SSLS-AA¹⁷-LFF, VPTEE:SSLS-AA¹⁷-LFF, VPTGQ:SSLS-AA¹⁷-LFF, SRVHH:SSLS-AA¹⁷-LFF, TQVQL:SSLS-AA¹⁷-LFF, APTEL:NAIS-AA¹⁷-LYF, APTKM:NAIS-AA¹⁷-LYF, APTKL:NAIS-AA¹⁷-LYF, APTRL:NAIS-AA¹⁷-LYF, APTKT:NAIS-AA¹⁷-LYF, APTAL:NAIS-AA¹⁷-LYF, APTDL:NAIS-AA¹⁷-LYF, VPTEL:NAIS-AA¹⁷-LYF, VPEKM:NAIS-AA¹⁷-LYF, VPTKL:NAIS-AA¹⁷-LYF, TPTKM:NAIS-AA¹⁷-LYF, VPARL:NAIS-AA¹⁷-LYF, VPTRL:NAIS-AA¹⁷-LYF, APVKT:NAIS-AA¹⁷-LYF, VPQAL:NAIS-AA¹⁷-LYF, VSQDL:NAIS-AA¹⁷-LYF, VPQDL:NAIS-AA¹⁷-LYF, VPTEE:NAIS-AA¹⁷-LYF, VPTGQ:NAIS-AA¹⁷-LYF, SRVHH:NAIS-AA¹⁷-LYF, TQVQL:NAIS-AA¹⁷-LYF, APTEL:SATS-AA¹⁷-LYY, APTKM:SATS-AA¹⁷-LYY, APTKL:SATS-AA¹⁷-LYY, APTQL:SATS-AA¹⁷-LYY, APTRL:SATS-AA¹⁷-LYY, APTKT:SATS-AA¹⁷-LYY, APTAL:SATS-AA¹⁷-LYY, APTDL:SATS-AA¹⁷-LYY, VPTEL:SATS-AA¹⁷-LYY, VPEKM:SATS-AA¹⁷-LYY, VPTKL:SATS-AA¹⁷-LYY, TPTKM:SATS-AA¹⁷-LYY, VPARL:SATS-AA¹⁷-LYY, VPTRL:SATS-AA¹⁷-LYY, APVKT:SATS-AA¹⁷-LYY, VPQAL:SATS-AA¹⁷-LYY, VSQDL:SATS-AA¹⁷-LYY, VPQDL:SATS-AA¹⁷-LYY, VPTEE:SATS-AA¹⁷-LYY, VPTGQ:SATS-AA¹⁷-LYY, SRVHH:SATS-AA¹⁷-LYY, TQVQL:SATS-AA¹⁷-LYY, VPTEL:SPIS-AA¹⁷-LYK, VPTKM:SPIS-AA¹⁷-LYK, VPTKL:SPIS-AA¹⁷-LYK, VPTQL:SPIS-AA¹⁷-LYK, VPTRL:SPIS-AA¹⁷-LYK, VPTKT:SPIS-AA¹⁷-LYK, VPTAL:SPIS-AA¹⁷-LYK, VPTDL:SPIS-AA¹⁷-LYK, VPEKM:SPIS-AA¹⁷-LYK, APTKL:SPIS-AA¹⁷-LYK, APTQL:SPIS-AA¹⁷-LYK, TPTKM:SPIS-AA¹⁷-LYK, VPARL:SPIS-AA¹⁷-LYK, APVKT:SPIS-AA¹⁷-LYK, VPQAL:SPIS-AA¹⁷-LYK, VSQDL:SPIS-AA¹⁷-LYK, VPQDL:SPIS-AA¹⁷-LYK, SRVHH:SPIS-AA¹⁷-LYK, TQVQL:SPIS-AA¹⁷-LYK, VPTEL:EPIS-AA¹⁷-LYL, VPTKM:EPIS-AA¹⁷-LYL, VPTKL:EPIS-AA¹⁷-LYL, VPTQL:EPIS-AA¹⁷-LYL, VPTRL:EPIS-AA¹⁷-LYL, VPTKT:EPIS-AA¹⁷-LYL, VPTAL:EPIS-AA¹⁷-LYL, VPTDL:EPIS-AA¹⁷-LYL, VPEKM:EPIS-AA¹⁷-LYL, APTKL:EPIS-AA¹⁷-LYL, APTQL:EPIS-AA¹⁷-LYL, TPTKM:EPIS-AA¹⁷-LYL, VPARL:EPIS-AA¹⁷-LYL, APVKT:EPIS-AA¹⁷-LYL, VPQAL:EPIS-AA¹⁷-LYL, VSQDL:EPIS-AA¹⁷-LYL, VPQDL:EPIS-AA¹⁷-LYL, SRVHH:EPIS-AA¹⁷-LYL, TQVQL:EPIS-AA¹⁷-LYL, TPTEL:SPIN-AA¹⁷-LYF, TPTKM:SPIN-AA¹⁷-LYF, TPTKL:SPIN-AA¹⁷-LYF, TPTQL:SPIN-AA¹⁷-LYF, TPTRL:SPIN-AA¹⁷-LYF, TPTKT:SPIN-AA¹⁷-LYF, TPTAL:SPIN-AA¹⁷-LYF, TPTDL:SPIN-AA¹⁷-LYF, VPTEL:SPIN-AA¹⁷-LYF, VPEKM:SPIN-AA¹⁷-LYF, APTKL:SPIN-AA¹⁷-LYF, APTQL:SPIN-AA¹⁷-LYF, VPTKL:SPIN-AA¹⁷-LYF, VPARL:SPIN-AA¹⁷-LYF, VPTRL:SPIN-AA¹⁷-LYF, APVKT:SPIN-AA¹⁷-LYF, VPQAL:SPIN-AA¹⁷-LYF, VSQDL:SPIN-AA¹⁷-LYF, VPQDL:SPIN-AA¹⁷-LYF, VPTEE:SPIN-AA¹⁷-LYF, VPTGQ:SPIN-AA¹⁷-LYF, SRVHH:SPIN-AA¹⁷-LYF, TQVQL:SPIN-AA¹⁷-LYF, VPAEL:SPIS-AA¹⁷-LYI, VPAKM:SPIS-AA¹⁷-LYI, VPAKL:SPIS-AA¹⁷-LYI, VPAQL:SPIS-AA¹⁷-LYI, VPARL:SPIS-AA¹⁷-LYI, VPAKT:SPIS-AA¹⁷-LYI, VPAAL:SPIS-AA¹⁷-LYI, VPADL:SPIS-AA¹⁷-LYI, VPTEL:SPIS-AA¹⁷-LYI, VPEKM:SPIS-AA¹⁷-LYI, APTKL:SPIS-AA¹⁷-LYI, APTQL:SPIS-AA¹⁷-LYI, VPTKL:SPIS-AA¹⁷-LYI, TPTKM:SPIS-AA¹⁷-LYI, VPTRL:SPIS-AA¹⁷-LYI, APVKT:SPIS-AA¹⁷-LYI, VPQAL:SPIS-AA¹⁷-LYI, VSQDL:SPIS-AA¹⁷-LYI, VPQDL:SPIS-AA¹⁷-LYI, VPTEE:SPIS-AA¹⁷-LYI, VPTGQ:SPIS-AA¹⁷-LYI, SRVHH:SPIS-AA¹⁷-LYI, TQVQL:SPIS-AA¹⁷-LYI, VPTEL:SPIS-AA¹⁷-LFI, VPTKM:SPIS-AA¹⁷-LFI, VPTKL:SPIS-AA¹⁷-LFI, VPTQL:SPIS-AA¹⁷-LFI, VPTRL:SPIS-AA¹⁷-LFI, VPTKT:SPIS-AA¹⁷-LFI, VPTAL:SPIS-AA¹⁷-LFI, VPTDL:SPIS-AA¹⁷-LFI, VPEKM:SPIS-AA¹⁷-LFI, APTKL:SPIS-AA¹⁷-LFI, APTQL:SPIS-AA¹⁷-LFI, TPTKM:SPIS-AA¹⁷-LFI, VPARL:SPIS-AA¹⁷-LFI, APVKT:SPIS-AA¹⁷-LFI, VPQAL:SPIS-AA¹⁷-LFI, VSQDL:SPIS-AA¹⁷-LFI, VPQDL:SPIS-AA¹⁷-LFI, SRVHH:SPIS-AA¹⁷-LFI, TQVQL:SPIS-AA¹⁷-LFI, APVEL:KPLS-AA¹⁷-LYV, APVKM:KPLS-AA¹⁷-LYV, APVKL:KPLS-AA¹⁷-LYV, APVQL:KPLS-AA¹⁷-LYV, APVRL:KPLS-AA¹⁷-LYV, APVAL:KPLS-AA¹⁷-LYV, APVDL:KPLS-AA¹⁷-LYV, VPTEL:KPLS-AA¹⁷-LYV, VPEKM:KPLS-AA¹⁷-LYV, APTKL:KPLS-AA¹⁷-LYV, APTQL:KPLS-AA¹⁷-LYV, VPTKL:KPLS-AA¹⁷-LYV, TPTKM:KPLS-AA¹⁷-LYV, VPARL:KPLS-AA¹⁷-LYV, VPTRL:KPLS-AA¹⁷-LYV, VPQAL:KPLS-AA¹⁷-LYV, VSQDL:KPLS-AA¹⁷-LYV, VPQDL:KPLS-AA¹⁷-LYV, VPTEE:KPLS-AA¹⁷-LYV, VPTGQ:KPLS-AA¹⁷-LYV, SRVHH:KPLS-AA¹⁷-LYV, TQVQL:KPLS-AA¹⁷-LYV, VPQEL:EPLP-AA¹⁷-VYY, VPQKM:EPLP-AA¹⁷-VYY, VPQKL:EPLP-AA¹⁷-VYY, VPQQL:EPLP-AA¹⁷-VYY, VPQRL:EPLP-AA¹⁷-VYY, VPQKT:EPLP-AA¹⁷-VYY, VPQDL:EPLP-AA¹⁷-VYY, VPTEL:EPLP-AA¹⁷-VYY, VPEKM:EPLP-AA¹⁷-VYY, APTKL:EPLP-AA¹⁷-VYY, APTQL:EPLP-AA¹⁷-VYY, VPTKL:EPLP-AA¹⁷-VYY, TPTKM:EPLP-AA¹⁷-VYY, VPARL:EPLP-AA¹⁷-VYY, VPTRL:EPLP-AA¹⁷-VYY, APVKT:EPLP-AA¹⁷-VYY, VSQDL:EPLP-AA¹⁷-VYY, VPTEE:EPLP-AA¹⁷-VYY, VPTGQ:EPLP-AA¹⁷-VYY, SRVHH:EPLP-AA¹⁷-VYY, TQVQL:EPLP-AA¹⁷-VYY, VSQEL:EPLT-AA¹⁷-LYY, VSQKM:EPLT-AA¹⁷-LYY, VSQKL:EPLT-AA¹⁷-LYY, VSQQL:EPLT-AA¹⁷-LYY, VSQRL:EPLT-AA¹⁷-LYY, VSQKT:EPLT-AA¹⁷-LYY, VSQAL:EPLT-AA¹⁷-LYY, VSQDL:EPLT-AA¹⁷-LYY, VPTEL:EPLT-AA¹⁷-LYY, VPEKM:EPLT-AA¹⁷-LYY, APTKL:EPLT-AA¹⁷-LYY, APTQL:EPLT-AA¹⁷-LYY, VPTKL:EPLT-AA¹⁷-LYY, TPTKM:EPLT-AA¹⁷-LYY, VPARL:EPLT-AA¹⁷-LYY, VPTRL:EPLT-AA¹⁷-LYY, APVKT:EPLT-AA¹⁷-LYY, VPQAL:EPLT-AA¹⁷-LYY, VPTEE:EPLT-AA¹⁷-LYY, VPTGQ:EPLT-AA¹⁷-LYY, SRVHH:EPLT-AA¹⁷-LYY, TQVQL:EPLT-AA¹⁷-LYY, VPQEL:EPLT-AA¹⁷-LYY, VPQKM:EPLT-AA¹⁷-LYY, VPQKL:EPLT-AA¹⁷-LYY, VPQQL:EPLT-AA¹⁷-LYY, VPQRL:EPLT-AA¹⁷-LYY, VPQKT:EPLT-AA¹⁷-LYY, VPQDL:EPLT-AA¹⁷-LYY, VPTGQ:SNIT-AA¹⁷-QIM, VPEKM:SNIT-AA¹⁷-QIM, APTKL:SNIT-AA¹⁷-QIM, APTQL:SNIT-AA¹⁷-QIM, TPTKM:SNIT-AA¹⁷-QIM, VPARL:SNIT-AA¹⁷-QIM, APVKT:SNIT-AA¹⁷-QIM, VPQAL:SNIT-AA¹⁷-QIM, VSQDL:SNIT-AA¹⁷-QIM, VPQDL:SNIT-AA¹⁷-QIM, SRVHH:SNIT-AA¹⁷-QIM, TQVQL:SNIT-AA¹⁷-QIM, SRVQL:RSVK-AA¹⁷-AKV, VPTEL:RSVK-AA¹⁷-AKV, VPEKM:RSVK-AA¹⁷-AKV, APTKL:RSVK-AA¹⁷-AKV, APTQL:RSVK-AA¹⁷-AKV, VPTKL:RSVK-AA¹⁷-AKV, TPTKM:RSVK-AA¹⁷-AKV, VPARL:RSVK-AA¹⁷-AKV, VPTRL:RSVK-AA¹⁷-AKV, APVKT:RSVK-AA¹⁷-AKV, VPQAL:RSVK-AA¹⁷-AKV, VSQDL:RSVK-AA¹⁷-AKV, VPQDL:RSVK-AA¹⁷-AKV, VPTEE:RSVK-AA¹⁷-AKV, VPTGQ:RSVK-AA¹⁷-AKV, TQVQL:RSVK-AA¹⁷-AKV, TQVHH:RPVQ-AA¹⁷-RKI, VPTEL:RPVQ-AA¹⁷-RKI, VPEKM:RPVQ-AA¹⁷-RKI, APTKL:RPVQ-AA¹⁷-RKI, APTQL:RPVQ-AA¹⁷-RKI, VPTKL:RPVQ-AA¹⁷-RKI, TPTKM:RPVQ-AA¹⁷-RKI, VPARL:RPVQ-AA¹⁷-RKI, VPTRL:RPVQ-AA¹⁷-RKI, APVKT:RPVQ-AA¹⁷-RKI, VPQAL:RPVQ-AA¹⁷-RKI, VSQDL:RPVQ-AA¹⁷-RKI, VPQDL:RPVQ-AA¹⁷-RKI, VPTEE:RPVQ-AA¹⁷-RKI, VPTGQ:RPVQ-AA¹⁷-RKI and SRVHH:RPVQ-AA¹⁷-RKI; and wherein AA¹⁷ is selected from the group consisting of G, A, V, L, I, P, F, M, W, T and S (in particular is selected from the group consisting of M, I, L, V and T).

[0409] In particular, in certain embodiments, the pair PEP12:PEP7 is selected from the group consisting of GIPEPXX:SAIS-AA¹⁷-LYL, HVTKPTX:SAIS-AA¹⁷-LYL, YVPKPXX:SAIS-AA¹⁷-LYL, TVPKPXX:SAIS-AA¹⁷-LYL, AVPKAXX:SAIS-AA¹⁷-LYL, KVGKAXX:SAIS-AA¹⁷-LYL, KASKAXX:SAIS-AA¹⁷-LYL, GSAGPXX:SAIS-AA¹⁷-LYL, AAPASXX:SAIS-AA¹⁷-LYL, STPPTXX:SAIS-AA¹⁷-LYL, HVPKPXX:SAIS-AA¹⁷-LYL, RVPSTXX:SAIS-AA¹⁷-LYL, ASAAPXX:SAIS-AA¹⁷-LYL, ASASAPXX:SAIS-AA¹⁷-LYL, SSVKXQP:SAIS-AA¹⁷-LYL, RNVQXRP:SAIS-AA¹⁷-LYL, KIPKAXX:SSLS-AA¹⁷-LFF, SIPKAXX:SSLS-AA¹⁷-LFF, HVTKPTX:SSLS-AA¹⁷-LFF, YVPKPXX:SSLS-AA¹⁷-LFF, TVPKPXX:SSLS-AA¹⁷-LFF, AVPKAXX:SSLS-AA¹⁷-LFF, KVGKAXX:SSLS-AA¹⁷-LFF, KASKAXX:SSLS-AA¹⁷-LFF, GSAGPXX:SSLS-AA¹⁷-LFF, AAPASXX:SSLS-AA¹⁷-LFF, STPPTXX:SSLS-AA¹⁷-LFF, HVPKPXX:SSLS-AA¹⁷-LFF, RVPSTXX:SSLS-AA¹⁷-LFF, ASAAPXX:SSLS-AA¹⁷-LFF, ASASPXX:SSLS-AA¹⁷-LFF, NDEGLEX:SSLS-AA¹⁷-LFF, SSVKXQP:SSLS-AA¹⁷-LFF, RNVQXRP:SSLS-AA¹⁷-LFF, KIPKAXX:NAIS-AA¹⁷-LYF, GIPEPXX:NAIS-AA¹⁷-LYF, SIPKAXX:NAIS-AA¹⁷-LYF, AVPKAXX:NAIS-AA¹⁷-LYF, KVGKAXX:NAIS-AA¹⁷-LYF, KASKAXX:NAIS-AA¹⁷-LYF, GSAGPXX:NAIS-AA¹⁷-LYF, AAPASXX:NAIS-AA¹⁷-LYF, STPPTXX:NAIS-AA¹⁷-LYF, RVPSTXX:NAIS-AA¹⁷-LYF, ASAAPXX:NAIS-AA¹⁷-LYF, ASASPXX:NAIS-AA¹⁷-LYF, NDEGLEX:NAIS-AA¹⁷-LYF, SSVKXQP:NAIS-AA¹⁷-LYF, RNVQXRP:NAIS-AA¹⁷-LYF, KIPKAXX:SATS-AA¹⁷-LYY, GIPEPXX:SATS-AA¹⁷-LYY, SIPKAXX:SATS-AA¹⁷-LYY, HVTKPTX:SATS-AA¹⁷-LYY, YVPKPXX:SATS-AA¹⁷-LYY, TVPKPXX:SATS-AA¹⁷-LYY, KVGKAXX:SATS-AA¹⁷-LYY, KASKAXX:SATS-AA¹⁷-LYY, GSAGPXX:SATS-AA¹⁷-LYY, AAPASXX:SATS-AA¹⁷-LYY, STPPTXX:SATS-AA¹⁷-LYY, HVPKPXX:SATS-AA¹⁷-LYY, RVPSTXX:SATS-AA¹⁷-LYY, ASAAPXX:SATS-AA¹⁷-LYY, ASASAPXX:SATS-AA¹⁷-LYY, NDEGLEX:SATS-AA¹⁷-LYY, SSVKXQP:SATS-AA¹⁷-LYY, RNVQXRP:SATS-AA¹⁷-LYY, KIPKAXX:SPIS-AA¹⁷-LYK, GIPEPXX:SPIS-AA¹⁷-LYK, SIPKAXX:SPIS-AA¹⁷-LYK, HVTKPTX:SPIS-AA¹⁷-LYK, YVPKPXX:SPIS-AA¹⁷-LYK, TVPKPXX:SPIS-AA¹⁷-LYK, AVPKAXX:SPIS-AA¹⁷-LYK, KASKAXX:SPIS-AA¹⁷-LYK, GSAGPXX:SEPIS-AA¹⁷-LYK, AAPASXX:SPIS-AA¹⁷-LYK, STPPTXX:SPIS-AA¹⁷-LYK, HVPKPXX:SPIS-AA¹⁷-LYK, RVPSTXX:SPIS-AA¹⁷-LYK, ASAAPXX:SPIS-AA¹⁷-LYK, ASASPXX:SPIS-AA¹⁷-LYK, SSVKXQP:SEPIS-AA¹⁷-LYK, RNVQXRP:SPIS-AA¹⁷-LYK, KIPKAXX:EPIS-AA¹⁷-LYL, GIPEPXX:EPIS-AA¹⁷-LYL, SIPKAXX:EPIS-AA¹⁷-LYL, HVTKPTX:EPIS-AA¹⁷-LYL, YVPKPXX:EPIS-AA¹⁷-LYL, TVPKPXX:EPIS-AA¹⁷-LYL, AVPKAXX:EPIS-AA¹⁷-LYL, KVGKAXX:EPIS-AA¹⁷-LYL, GSAGPXX:EPIS-AA¹⁷-LYL, AAPASXX:EPIS-AA¹⁷-LYL, STPPTXX:EPIS-AA¹⁷-LYL, HVPKPXX:EPIS-AA¹⁷-LYL, RVPSTXX:EPIS-AA¹⁷-LYL, ASAAPXX:EPIS-AA¹⁷-LYL, ASASPXX:EPIS-AA¹⁷-LYL, SSVKXQP:EPIS-AA¹⁷-LYL, RNVQXRP:EPIS-AA¹⁷-LYL, KIPKAXX:SPIN-AA¹⁷-LYF, GIPEPXX:SPIN-AA¹⁷-LYF, SIPKAXX:SPIN-AA¹⁷-LYF, HVTKPTX:SPIN-AA¹⁷-LYF, YVPKPXX:SPIN-AA¹⁷-LYF, TVPKPXX:SPIN-AA¹⁷-LYF, AVPKAXX:SPIN-AA¹⁷-LYF, KVGKAXX:SPIN-AA¹⁷-LYF, KASKAXX:SPIN-AA¹⁷-LYF, AAPASXX:SPIN-AA¹⁷-LYF, STPPTXX:SPIN-AA¹⁷-LYF, HVPKPXX:SPIN-AA¹⁷-LYF, RVPSTXX:SPIN-AA¹⁷-LYF, ASAAPXX:SPIN-AA¹⁷-LYF, ASASPXX:SPIN-AA¹⁷-LYF, NDEGLEX:SPIN-AA¹⁷-LYF, SSVKXQP:SPIN-AA¹⁷-LYF, RNVQXRP:SPIN-AA¹⁷-LYF, KIPKAXX:SPIS-AA¹⁷-LYI, GIPEPXX:SPIS-AA¹⁷-LYI, SIPKAXX:SPIS-AA¹⁷-LYI, HVTKPTX:SPIS-AA¹⁷-LYI, YVPKPXX:SPIS-AA¹⁷-LYI, TVPKPXX:SPIS-AA¹⁷-LYI, AVPKAXX:SPIS-AA¹⁷-LYI, KVGKAXX:SPIS-AA¹⁷-LYI, KASKAXX:SPIS-AA¹⁷-LYI, GSAGPXX:SPIS-AA¹⁷-LYI, STPPTXX:SPIS-AA¹⁷-LYI, HVPKPXX:SPIS-AA¹⁷-LYI, RVPSTXX:SPIS-AA¹⁷-LYI, ASAAPXX:SPIS-AA¹⁷-LYI, ASASPXX:SPIS-AA¹⁷-LYI, NDEGLEX:SPIS-AA¹⁷-LYI, SSVKXQP:SPIS-AA¹⁷-LYI, RNVQXRP:SPIS-AA¹⁷-LYI, KIPKAXX:SPIS-AA¹⁷-LFI, GIPEPXX:SPIS-AA¹⁷-LFI, SIPKAXX:SPIS-AA¹⁷-LFI, HVTKPTX:SPIS-AA¹⁷-LFI, YVPKPXX:SPIS-AA¹⁷-LFI, TVPKPXX:SPIS-AA¹⁷-LFI, AVPKAXX:SPIS-AA¹⁷-LFI, KVGKAXX:SPIS-AA¹⁷-LFI, KASKAXX:SPIS-AA¹⁷-LFI, GSAGPXX:SPIS-AA¹⁷-LFI, AAPASXX:SPIS-AA¹⁷-LFI, HVPKPXX:SPIS-AA¹⁷-LFI, RVPSTXX:SPIS-AA¹⁷-LFI, ASAAPXX:SPIS-AA¹⁷-LFI, ASASPXX:SPIS-AA¹⁷-LFI, SSVKXQP:SPIS-AA¹⁷-LFI, RNVQXRP:SPIS-AA¹⁷-LFI, KIPKAXX:KPLS-AA¹⁷-LYV, GIPEPXX:KPLS-AA¹⁷-LYV, SIPKAXX:KPLS-AA¹⁷-LYV, HVTKPTX:KPLS-AA¹⁷-LYV, YVPKPXX:KPLS-AA¹⁷-LYV, TVPKPXX:KPLS-AA¹⁷-LYV, AVPKAXX:KPLS-AA¹⁷-LYV, KVGKAXX:KPLS-AA¹⁷-LYV, KASKAXX:KPLS-AA¹⁷-LYV, GSAGPXX:KPLS-AA¹⁷-LYV, AAPASXX:KPLS-AA¹⁷-LYV, STPPTXX:KPLS-AA¹⁷-LYV, HVPKPXX:KPLS-AA¹⁷-LYV, ASAAPXX:KPLS-AA¹⁷-LYV, ASASPXX:KPLS-AA¹⁷-LYV, NDEGLEX:KPLS-AA¹⁷-LYV, SSVKXQP:KPLS-AA¹⁷-LYV, RNVQXRP:KPLS-AA¹⁷-LYV, KIPKAXX:EPLP-AA¹⁷-VYY, GIPEPXX:EPLP-AA¹⁷-VYY, SIPKAXX:EPLP-AA¹⁷-VYY, HVTKPTX:EPLP-AA¹⁷-VYY, YVPKPXX:EPLP-AA¹⁷-VYY, TVPKPXX:EPLP-AA¹⁷-VYY, AVPKAXX:EPLP-AA¹⁷-VYY, KVGKAXX:EPLP-AA¹⁷-VYY, KASKAXX:EPLP-AA¹⁷-VYY, GSAGPXX:EPLP-AA¹⁷-VYY, AAPASXX:EPLP-AA¹⁷-VYY, STPPTXX:EPLP-AA¹⁷-VYY, HVPKPXX:EPLP-AA¹⁷-VYY, RVPSTXX:EPLP-AA¹⁷-VYY, ASASPXX:EPLP-AA¹⁷-VYY, NDEGLEX:EPLP-AA¹⁷-VYY, SSVKXQP:EPLP-AA¹⁷-VYY, RNVQXRP:EPLP-AA¹⁷-VYY, KIPKAXX:EPLT-AA¹⁷-LYY, GIPEPXX:EPLT-AA¹⁷-LYY, SIPKAXX:EPLT-AA¹⁷-LYY, HVTKPTX:EPLT-AA¹⁷-LYY, YVPKPXX:EPLT-AA¹⁷-LYY, TVPKPXX:EPLT-AA¹⁷-LYY, AVPKAXX:EPLT-AA¹⁷-LYY, KVGKAXX:EPLT-AA¹⁷-LYY, KASKAXX:EPLT-AA¹⁷-LYY, GSAGPXX:EPLT-AA¹⁷-LYY, AAPASXX:EPLT-AA¹⁷-LYY, STPPTXX:EPLT-AA¹⁷-LYY, HVPKPXX:EPLT-AA¹⁷-LYY, RVPSTXX:EPLT-AA¹⁷-LYY, ASAAPXX:EPLT-AA¹⁷-LYY, ASASPXX:EPLT-AA¹⁷-LYY, NDEGLEX:EPLT-AA¹⁷-LYY, SSVKXQP:EPLT-AA¹⁷-LYY, RNVQXRP:EPLT-AA¹⁷-LYY, NDEGLEX:SNIT-AA¹⁷-QIM, GIPEPXX:SNIT-AA¹⁷-QIM, HVTKPTX:SNIT-AA¹⁷-QIM, YVPKPXX:SNIT-AA¹⁷-QIM, TVPKPXX:SNIT-AA¹⁷-QIM, AVPKAXX:SNIT-AA¹⁷-QIM, GSAGPXX:SNIT-AA¹⁷-QIM, AAPASXX:SNIT-AA¹⁷-QIM, HVPKPXX:SNIT-AA¹⁷-QIM, RVPSTXX:SNIT-AA¹⁷-QIM, ASAAPXX:SNIT-AA¹⁷-QIM, ASASPXX:SNIT-AA¹⁷-QIM, SSVKXQP:SNIT-AA¹⁷-QIM, RNVQXRP:SNIT-AA¹⁷-QIM, RNVQXRP:RSVK-AA¹⁷-AKV, KIPKAXX:RSVK-AA¹⁷-AKV, GIPEPXX:RSVK-AA¹⁷-AKV, SIPKAXX:RSVK-AA¹⁷-AKV, HVTKPTX:RSVK-AA¹⁷-AKV, YVPKPXX:RSVK-AA¹⁷-AKV, TVPKPXX:RSVK-AA¹⁷-AKV, AVPKAXX:RSVK-AA¹⁷-AKV, KVGKAXX:RSVK-AA¹⁷-AKV, KASKAXX:RSVK-AA¹⁷-AKV, GSAGPXX:RSVK-AA¹⁷-AKV, AAPASXX:RSVK-AA¹⁷-AKV, STPPTXX:RSVK-AA¹⁷-AKV, HVPKPXX:RSVK-AA¹⁷-AKV, RVPSTXX:RSVK-AA¹⁷-AKV, ASAAPXX:RSVK-AA¹⁷-AKV, ASASPXX:RSVK-AA¹⁷-AKV, NDEGLEX:RSVK-AA¹⁷-AKV, SSVKXQP:RPVQ-AA¹⁷-RKI, KIPKAXX:RPVQ-AA¹⁷-RKI, GIPEPXX:RPVQ-AA¹⁷-RKI, SIPKAXX:RPVQ-AA¹⁷-RKI, HVTKPTX:RPVQ-AA¹⁷-RKI, YVPKPXX:RPVQ-AA¹⁷-RKI, TVPKPXX:RPVQ-AA¹⁷-RKI, AVPKAXX:RPVQ-AA¹⁷-RKI, KVGKAXX:RPVQ-AA¹⁷-RKI, KASKAXX:RPVQ-AA¹⁷-RKI, GSAGPXX:RPVQ-AA¹⁷-RKI, AAPASXX:RPVQ-AA¹⁷-RKI, STPPTXX:RPVQ-AA¹⁷-RKI, HVPKPXX:RPVQ-AA¹⁷-RKI, RVPSTXX:RPVQ-AA¹⁷-RKI, ASAAPXX:RPVQ-AA¹⁷-RKI, ASASPXX:RPVQ-AA¹⁷-RKI and NDEGLEX:RPVQ-AA¹⁷-RKI; and wherein AA¹⁷ is selected from the group consisting of G, A, V, L, I, P, F, M, W, T and S (in particular is selected from the group consisting of M, I, L, V and T).

[0410] In particular, in certain embodiments, the pair PEP12:PEP9 is selected from the group consisting of GIPEPXXVPTKM:SAIS-AA¹⁷-LYL, HVTKPTXVPTKL:SAIS-AA¹⁷-LYL, YVPKPXXVPTKL:SAIS-AA¹⁷-LYL, TVPKPXXVPTQL:SAIS-AA¹⁷-LYL, AVPKAXXVPTKL:SAIS-AA¹⁷-LYL, KVGKAXXVPTKL:SAIS-AA¹⁷-LYL, KASKAXXVPTKL:SAIS-AA¹⁷-LYL, GSAGPXXVPTKM:SAIS-AA¹⁷-LYL, AAPASXXVPTRL:SAIS-AA¹⁷-LYL, STPPTXXVPTRL:SAIS-AA¹⁷-LYL, HVPKPXXVPTKL:SAIS-AA¹⁷-LYL, RVPSTXXVPTKT:SAIS-AA¹⁷-LYL, ASAAPXXVPTAL:SAIS-AA¹⁷-LYL, ASASPXXVPTDL:SAIS-AA¹⁷-LYL, GIPEPXXVPEKM:SAIS-AA¹⁷-LYL, HVTKPTXAPTKL:SAIS-AA¹⁷-LYL, YVPKPXXAPTKL:SAIS-AA¹⁷-LYL, TVPKPXXAPTQL:SAIS-AA¹⁷-LYL, AVPKAXXAPTKL:SAIS-AA¹⁷-LYL, GSAGPXXTPTKM:SAIS-AA¹⁷-LYL, AAPASXXVPARL:SAIS-AA¹⁷-LYL, HVPKPXXAPTKL:SAIS-AA¹⁷-LYL, RVPSTXXAPVKT:SAIS-AA¹⁷-LYL, ASAAPXXVPQAL:SAIS-AA¹⁷-LYL, ASASPXXVSQDL:SAIS-AA¹⁷-LYL, ASASPXXVPQDL:SAIS-AA¹⁷-LYL, SSVKXQPSRVHH:SAIS-AA¹⁷-LYL, RNVQXRPTQVQL:SAIS-AA¹⁷-LYL, KIPKAXXVPEEL:SSLS-AA¹⁷-LFF, SIPKAXXVPEEL:SSLS-AA¹⁷-LFF, HVTKPTXVPEKL:SSLS-AA¹⁷-LFF, YVPKPXXVPEKL:SSLS-AA¹⁷-LFF, TVPKPXXVPEQL:SSLS-AA¹⁷-LFF, AVPKAXXVPEKL:SSLS-AA¹⁷-LFF, KVGKAXXVPEKL:SSLS-AA¹⁷-LFF, KASKAXXVPEKL:SSLS-AA¹⁷-LFF, GSAGPXXVPEKM:SSLS-AA¹⁷-LFF, AAPASXXVPERL:SSLS-AA¹⁷-LFF, STPPTXXVPERL:SSLS-AA¹⁷-LFF, HVPKPXXVPEKL:SSLS-AA¹⁷-LFF, RVPSTXXVPEKT:SSLS-AA¹⁷-LFF, ASAAPXXVPEAL:SSLS-AA¹⁷-LFF, ASASPXXVPEDL:SSLS-AA¹⁷-LFF, KIPKAXXVPTEL:SSLS-AA¹⁷-LFF, SIPKAXXVPTEL:SSLS-AA¹⁷-LFF, HVTKPTXAPTKL:SSLS-AA¹⁷-LFF, YVPKPXXAPTKL:SSLS-AA¹⁷-LFF, TVPKPXXAPTQL:SSLS-AA¹⁷-LFF, AVPKAXXAPTKL:SSLS-AA¹⁷-LFF, KVGKAXXVPTKL:SSLS-AA¹⁷-LFF, KASKAXXVPTKL:SSLS-AA¹⁷-LFF, GSAGPXXTPTKM:SSLS-AA¹⁷-LFF, AAPASXXVPARL:SSLS-AA¹⁷-LFF, STPPTXXVPTRL:SSLS-AA¹⁷-LFF, HVPKPXXAPTKL:SSLS-AA¹⁷-LFF, RVPSTXXAPVKT:SSLS-AA¹⁷-LFF, ASAAPXXVPQAL:SSLS-AA¹⁷-LFF, ASASPXXVSQDL:SSLS-AA¹⁷-LFF, ASASPXXVPQDL:SSLS-AA¹⁷-LFF, NDEGLEXVPTEE:SSLS-AA¹⁷-LFF, NDEGLEXVPTGQ:SSLS-AA¹⁷-LFF, SSVKXQPSRVHH:SSLS-AA¹⁷-LFF, RNVQXRPTQVQL:SSLS-AA¹⁷-LFF, KIPKAXXAPTEL:NAIS-AA¹⁷-LYF, GIPEPXXAPTKM:NAIS-AA¹⁷-LYF, SIPKAXXAPTEL:NAIS-AA¹⁷-LYF, AVPKAXXAPTKL:NAIS-AA¹⁷-LYF, KVGKAXXAPTKL:NAIS-AA¹⁷-LYF, KASKAXXAPTKL:NAIS-AA¹⁷-LYF, GSAGPXXAPTKM:NAIS-AA¹⁷-LYF, AAPASXXAPTRL:NAIS-AA¹⁷-LYF, STPPTXXAPTRL:NAIS-AA¹⁷-LYF, RVPSTXXAPTKT:NAIS-AA¹⁷-LYF, ASAAPXXAPTAL:NAIS-AA¹⁷-LYF, ASASPXXAPTDL:NAIS-AA¹⁷-LYF, KIPKAXXVPTEL:NAIS-AA¹⁷-LYF, GIPEPXXVPEKM:NAIS-AA¹⁷-LYF, SIPKAXXVPTEL:NAIS-AA¹⁷-LYF, KVGKAXXVPTKL:NAIS-AA¹⁷-LYF, KASKAXXVPTKL:NAIS-AA¹⁷-LYF, GSAGPXXTPTKM:NAIS-AA¹⁷-LYF, AAPASXXVPARL:NAIS-AA¹⁷-LYF, STPPTXXVPTRL:NAIS-AA¹⁷-LYF, RVPSTXXAPVKT:NAIS-AA¹⁷-LYF, ASAAPXXVPQAL:NAIS-AA¹⁷-LYF, ASASPXXVSQDL:NAIS-AA¹⁷-LYF, ASASPXXVPQDL:NAIS-AA¹⁷-LYF, NDEGLEXVPTEE:NAIS-AA¹⁷-LYF, NDEGLEXVPTGQ:NAIS-AA¹⁷-LYF, SSVKXQPSRVHH:NAIS-AA¹⁷-LYF, RNVQXRPTQVQL:NAIS-AA¹⁷-LYF, KIPKAXXAPTEL:SATS-AA¹⁷-LYY, GIPEPXXAPTKM:SATS-AA¹⁷-LYY, SIPKAXXAPTEL:SATS-AA¹⁷-LYY, HVTKPTXAPTKL:SATS-AA¹⁷-LYY, YVPKPXXAPTKL:SATS-AA¹⁷-LYY, TVPKPXXAPTQL:SATS-AA¹⁷-LYY, KVGKAXXAPTKL:SATS-AA¹⁷-LYY, KASKAXXAPTKL:SATS-AA¹⁷-LYY, GSAGPXXAPTKM:SATS-AA¹⁷-LYY, AAPASXXAPTRL:SATS-AA¹⁷-LYY, STPPTXXAPTRL:SATS-AA¹⁷-LYY, HVPKPXXAPTKL:SATS-AA¹⁷-LYY, RVPSTXXAPTKT:SATS-AA¹⁷-LYY, ASAAPXXAPTAL:SATS-AA¹⁷-LYY, ASASPXXAPTDL:SATS-AA¹⁷-LYY, KIPKAXXVPTEL:SATS-AA¹⁷-LYY, GIPEPXXVPEKM:SATS-AA¹⁷-LYY, SIPKAXXVPTEL:SATS-AA¹⁷-LYY, KVGKAXXVPTKL:SATS-AA¹⁷-LYY, KASKAXXVPTKL:SATS-AA¹⁷-LYY, GSAGPXXTPTKM:SATS-AA¹⁷-LYY, AAPASXXVPARL:SATS-AA¹⁷-LYY, STPPTXXVPTRL:SATS-AA¹⁷-LYY, RVPSTXXAPVKT:SATS-AA¹⁷-LYY, ASAAPXXVPQAL:SATS-AA¹⁷-LYY, ASASPXXVSQDL:SATS-AA¹⁷-LYY, ASASPXXVPQDL:SATS-AA¹⁷-LYY, NDEGLEXVPTEE:SATS-AA¹⁷-LYY, NDEGLEXVPTGQ:SATS-AA¹⁷-LYY, SSVKXQPSRVHH:SATS-AA¹⁷-LYY, RNVQXRPTQVQL:SATS-AA¹⁷-LYY, KIPKAXXVPTEL:SPIS-AA¹⁷-LYK, GIPEPXXVPTKM:SPIS-AA¹⁷-LYK, SIPKAXXVPTEL:SPIS-AA¹⁷-LYK, HVTKPTXVPTKL:SPIS-AA¹⁷-LYK, YVPKPXXVPTKL:SPIS-AA¹⁷-LYK, TVPKPXXVPTQL:SPIS-AA¹⁷-LYK, AVPKAXXVPTKL:SPIS-AA¹⁷-LYK, KASKAXXVPTKL:SPIS-AA¹⁷-LYK, GSAGPXXVPTKM:SPIS-AA¹⁷-LYK, AAPASXXVPTRL:SPIS-AA¹⁷-LYK, STPPTXXVPTRL:SPIS-AA¹⁷-LYK, HVPKPXXVPTKL:SPIS-AA¹⁷-LYK, RVPSTXXVPTKT:SPIS-AA¹⁷-LYK, ASAAPXXVPTAL:SPIS-AA¹⁷-LYK, ASASPXXVPTDL:SPIS-AA¹⁷-LYK, GIPEPXXVPEKM:SPIS-AA¹⁷-LYK, HVTKPTXAPTKL:SPIS-AA¹⁷-LYK, YVPKPXXAPTKL:SPIS-AA¹⁷-LYK, TVPKPXXAPTQL:SPIS-AA¹⁷-LYK, AVPKAXXAPTKL:SPIS-AA¹⁷-LYK, GSAGPXXTPTKM:SPIS-AA¹⁷-LYK, AAPASXXVPARL:SPIS-AA¹⁷-LYK, HVPKPXXAPTKL:SPIS-AA¹⁷-LYK, RVPSTXXAPVKT:SPIS-AA¹⁷-LYK, ASAAPXXVPQAL:SPIS-AA¹⁷-LYK, ASASPXXVSQDL:SPIS-AA¹⁷-LYK, ASASPXXVPQDL:SPIS-AA¹⁷-LYK, SSVKXQPSRVHH:SPIS-AA¹⁷-LYK, RNVQXRPTQVQL:SPIS-AA¹⁷-LYK, KIPKAXXVPTEL:EPIS-AA¹⁷-LYL, GIPEPXXVPTKM:EPIS-AA¹⁷-LYL, SIPKAXXVPTEL:EPIS-AA¹⁷-LYL, HVTKPTXVPTKL:EPIS-AA¹⁷-LYL, YVPKPXXVPTKL:EPIS-AA¹⁷-LYL, TVPKPXXVPTQL:EPIS-AA¹⁷-LYL, AVPKAXXVPTKL:EPIS-AA¹⁷-LYL, KVGKAXXVPTKL:EPIS-AA¹⁷-LYL, GSAGPXXVPTKM:EPIS-AA¹⁷-LYL, AAPASXXVPTRL:EPIS-AA¹⁷-LYL, STPPTXXVPTRL:EPIS-AA¹⁷-LYL, HVPKPXXVPTKL:EPIS-AA¹⁷-LYL, RVPSTXXVPTKT:EPIS-AA¹⁷-LYL, ASAAPXXVPTAL:EPIS-AA¹⁷-LYL, ASASPXXVPTDL:EPIS-AA¹⁷-LYL, GIPEPXXVPEKM:EPIS-AA¹⁷-LYL, HVTKPTXAPTKL:EPIS-AA¹⁷-LYL, YVPKPXXAPTKL:EPIS-AA¹⁷-LYL, TVPKPXXAPTQL:EPIS-AA¹⁷-LYL, AVPKAXXAPTKL:EPIS-AA¹⁷-LYL, GSAGPXXTPTKM:EPIS-AA¹⁷-LYL, AAPASXXVPARL:EPIS-AA¹⁷-LYL, HVPKPXXAPTKL:EPIS-AA¹⁷-LYL, RVPSTXXAPVKT:EPIS-AA¹⁷-LYL, ASAAPXXVPQAL:EPIS-AA¹⁷-LYL, ASASPXXVSQDL:EPIS-AA¹⁷-LYL, ASASPXXVPQDL:EPIS-AA¹⁷-LYL, SSVKXQPSRVHH:EPIS-AA¹⁷-LYL, RNVQXRPTQVQL:EPIS-AA¹⁷-LYL, KIPKAXXTPTEL:SPIN-AA¹⁷-LYF, GIPEPXXTPTKM:SPIN-AA¹⁷-LYF, SIPKAXXTPTEL:SPIN-AA¹⁷-LYF, HVTKPTXTPTKL:SPIN-AA¹⁷-LYF, YVPKPXXTPTKL:SPIN-AA¹⁷-LYF, TVPKPXXTPTQL:SPIN-AA¹⁷-LYF, AVPKAXXTPTKL:SPIN-AA¹⁷-LYF, KVGKAXXTPTKL:SPIN-AA¹⁷-LYF, KASKAXXTPTKL:SPIN-AA¹⁷-LYF, AAPASXXTPTRL:SPIN-AA¹⁷-LYF, STPPTXXTPTRL:SPIN-AA¹⁷-LYF, HVPKPXXTPTKL:SPIN-AA¹⁷-LYF, RVPSTXXTPTKT:SPIN-AA¹⁷-LYF, ASAAPXXTPTAL:SPIN-AA¹⁷-LYF, ASASPXXTPTDL:SPIN-AA¹⁷-LYF, KIPKAXXVPTEL:SPIN-AA¹⁷-LYF, GIPEPXXVPEKM:SPIN-AA¹⁷-LYF, SIPKAXXVPTEL:SPIN-AA¹⁷-LYF, HVTKPTXAPTKL:SPIN-AA¹⁷-LYF, YVPKPXXAPTKL:SPIN-AA¹⁷-LYF, TVPKPXXAPTQL:SPIN-AA¹⁷-LYF, AVPKAXXAPTKL:SPIN-AA¹⁷-LYF, KVGKAXXVPTKL:SPIN-AA¹⁷-LYF, KASKAXXVPTKL:SPIN-AA¹⁷-LYF, AAPASXXVPARL:SPIN-AA¹⁷-LYF, STPPTXXVPTRL:SPIN-AA¹⁷-LYF, HVPKPXXAPTKL:SPIN-AA¹⁷-LYF, RVPSTXXAPVKT:SPIN-AA¹⁷-LYF, ASAAPXXVPQAL:SPIN-AA¹⁷-LYF, ASASPXXVSQDL:SPIN-AA¹⁷-LYF, ASASPXXVPQDL:SPIN-AA¹⁷-LYF, NDEGLEXVPTEE:SPIN-AA¹⁷-LYF, NDEGLEXVPTGQ:SPIN-AA¹⁷-LYF, SSVKXQPSRVHH:SPIN-AA¹⁷-LYF, RNVQXRPTQVQL:SPIN-AA¹⁷-LYF, KIPKAXXVPAEL:SPIS-AA¹⁷-LYI, GIPEPXXVPAKM:SPIS-AA¹⁷-LYI, SIPKAXXVPAEL:SPIS-AA¹⁷-LYI, HVTKPTXVPAKL:SPIS-AA¹⁷-LYI, YVPKPXXVPAKL:SPIS-AA¹⁷-LYI, TVPKPXXVPAQL:SPIS-AA¹⁷-LYI, AVPKAXXVPAKL:SPIS-AA¹⁷-LYI, KVGKAXXVPAKL:SPIS-AA¹⁷-LYI, KASKAXXVPAKL:SPIS-AA¹⁷-LYI, GSAGPXXVPAKM:SPIS-AA¹⁷-LYI, STPPTXXVPARL:SPIS-AA¹⁷-LYI, HVPKPXXVPAKL:SPIS-AA¹⁷-LYI, RVPSTXXVPAKT:SPIS-AA¹⁷-LYI, ASAAPXXVPAAL:SPIS-AA¹⁷-LYI, ASASPXXVPADL:SPIS-AA¹⁷-LYI, KIPKAXXVPTEL:SPIS-AA¹⁷-LYI, GIPEPXXVPEKM:SPIS-AA¹⁷-LYI, SIPKAXXVPTEL:SPIS-AA¹⁷-LYI, HVTKPTXAPTKL:SPIS-AA¹⁷-LYI, YVPKPXXAPTKL:SPIS-AA¹⁷-LYI, TVPKPXXAPTQL:SPIS-AA¹⁷-LYI, AVPKAXXAPTKL:SPIS-AA¹⁷-LYI, KVGKAXXVPTKL:SPIS-AA¹⁷-LYI, KASKAXXVPTKL:SPIS-AA¹⁷-LYI, GSAGPXXTPTKM:SPIS-AA¹⁷-LYI, STPPTXXVPTRL:SPIS-AA¹⁷-LYI, HVPKPXXAPTKL:SPIS-AA¹⁷-LYI, RVPSTXXAPVKT:SPIS-AA¹⁷-LYI, ASAAPXXVPQAL:SPIS-AA¹⁷-LYI, ASASPXXVSQDL:SPIS-AA¹⁷-LYI, ASASPXXVPQDL:SPIS-AA¹⁷-LYI, NDEGLEXVPTEE:SPIS-AA¹⁷-LYI, NDEGLEXVPTGQ:SPIS-AA¹⁷-LYI, SSVKXQPSRVHH:SPIS-AA¹⁷-LYI, RNVQXRPTQVQL:SPIS-AA¹⁷-LYI, KIPKAXXVPTEL:SPIS-AA¹⁷-LFI, GIPEPXXVPTKM:SPIS-AA¹⁷-LFI, SIPKAXXVPTEL:SPIS-AA¹⁷-LFI, HVTKPTXVPTKL:SPIS-AA¹⁷-LFI, YVPKPXXVPTKL:SPIS-AA¹⁷-LFI, TVPKPXXVPTQL:SPIS-AA¹⁷-LFI, AVPKAXXVPTKL:SPIS-AA¹⁷-LFI, KVGKAXXVPTKL:SPIS-AA¹⁷-LFI, KASKAXXVPTKL:SPIS-AA¹⁷-LFI, GSAGPXXVPTKM:SPIS-AA¹⁷-LFI, AAPASXXVPTRL:SPIS-AA¹⁷-LFI, HVPKPXXVPTKL:SPIS-AA¹⁷-LFI, RVPSTXXVPTKT:SPIS-AA¹⁷-LFI, ASAAPXXVPTAL:SPIS-AA¹⁷-LFI, ASASPXXVPTDL:SPIS-AA¹⁷-LFI, GIPEPXXVPEKM:SPIS-AA¹⁷-LFI, HVTKPTXAPTKL:SPIS-AA¹⁷-LFI, YVPKPXXAPTKL:SPIS-AA¹⁷-LFI, TVPKPXXAPTQL:SPIS-AA¹⁷-LFI, AVPKAXXAPTKL:SPIS-AA¹⁷-LFI, GSAGPXXTPTKM:SPIS-AA¹⁷-LFI, AAPASXXVPARL:SPIS-AA¹⁷-LFI, HVPKPXXAPTKL:SPIS-AA¹⁷-LFI, RVPSTXXAPVKT:SPIS-AA¹⁷-LFI, ASAAPXXVPQAL:SPIS-AA¹⁷-LFI, ASASPXXVSQDL:SPIS-AA¹⁷-LFI, ASASPXXVPQDL:SPIS-AA¹⁷-LFI, SSVKXQPSRVHH:SPIS-AA¹⁷-LFI, RNVQXRPTQVQL:SPIS-AA¹⁷-LFI, KIPKAXXAPVEL:KPLS-AA¹⁷-LYV, GIPEPXXAPVKM:KPLS-AA¹⁷-LYV, SIPKAXXAPVEL:KPLS-AA¹⁷-LYV, HVTKPTXAPVKL:KPLS-AA¹⁷-LYV, YVPKPXXAPVKL:KPLS-AA¹⁷-LYV, TVPKPXXAPVQL:KPLS-AA¹⁷-LYV, AVPKAXXAPVKL:KPLS-AA¹⁷-LYV, KVGKAXXAPVKL:KPLS-AA¹⁷-LYV, KASKAXXAPVKL:KPLS-AA¹⁷-LYV, GSAGPXXAPVKM:KPLS-AA¹⁷-LYV, AAPASXXAPVRL:KPLS-AA¹⁷-LYV, STPPTXXAPVRL:KPLS-AA¹⁷-LYV, HVPKPXXAPVKL:KPLS-AA¹⁷-LYV, ASAAPXXAPVAL:KPLS-AA¹⁷-LYV, ASASPXXAPVDL:KPLS-AA¹⁷-LYV, KIPKAXXVPTEL:KPLS-AA¹⁷-LYV, GIPEPXXVPEKM:KPLS-AA¹⁷-LYV, SIPKAXXVPTEL:KPLS-AA¹⁷-LYV, HVTKPTXAPTKL:KPLS-AA¹⁷-LYV, YVPKPXXAPTKL:KPLS-AA¹⁷-LYV, TVPKPXXAPTQL:KPLS-AA¹⁷-LYV, AVPKAXXAPTKL:KPLS-AA¹⁷-LYV, KVGKAXXVPTKL:KPLS-AA¹⁷-LYV, KASKAXXVPTKL:KPLS-AA¹⁷-LYV, GSAGPXXTPTKM:KPLS-AA¹⁷-LYV, AAPASXXVPARL:KPLS-AA¹⁷-LYV, STPPTXXVPTRL:KPLS-AA¹⁷-LYV, HVPKPXXAPTKL:KPLS-AA¹⁷-LYV, ASAAPXXVPQAL:KPLS-AA¹⁷-LYV, ASASPXXVSQDL:KPLS-AA¹⁷-LYV, ASASPXXVPQDL:KPLS-AA¹⁷-LYV, NDEGLEXVPTEE:KPLS-AA¹⁷-LYV, NDEGLEXVPTGQ:KPLS-AA¹⁷-LYV, SSVKXQPSRVHH:KPLS-AA¹⁷-LYV, RNVQXRPTQVQL:KPLS-AA¹⁷-LYV, KIPKAXXVPQEL:EPLP-AA¹⁷-VYY, GIPEPXXVPQKM:EPLP-AA¹⁷-VYY, SIPKAXXVPQEL:EPLP-AA¹⁷-VYY, HVTKPTXVPQKL:EPLP-AA¹⁷-VYY, YVPKPXXVPQKL:EPLP-AA¹⁷-VYY, TVPKPXXVPQQL:EPLP-AA¹⁷-VYY, AVPKAXXVPQKL:EPLP-AA¹⁷-VYY, KVGKAXXVPQKL:EPLP-AA¹⁷-VYY, KASKAXXVPQKL:EPLP-AA¹⁷-VYY, GSAGPXXVPQKM:EPLP-AA¹⁷-VYY, AAPASXXVPQRL:EPLP-AA¹⁷-VYY, STPPTXXVPQRL:EPLP-AA¹⁷-VYY, HVPKPXXVPQKL:EPLP-AA¹⁷-VYY, RVPSTXXVPQKT:EPLP-AA¹⁷-VYY, ASASPXXVPQDL:EPLP-AA¹⁷-VYY, KIPKAXXVPTEL:EPLP-AA¹⁷-VYY, GIPEPXXVPEKM:EPLP-AA¹⁷-VYY, SIPKAXXVPTEL:EPLP-AA¹⁷-VYY, HVTKPTXAPTKL:EPLP-AA¹⁷-VYY, YVPKPXXAPTKL:EPLP-AA¹⁷-VYY, TVPKPXXAPTQL:EPLP-AA¹⁷-VYY, AVPKAXXAPTKL:EPLP-AA¹⁷-VYY, KVGKAXXVPTKL:EPLP-AA¹⁷-VYY, KASKAXXVPTKL:EPLP-AA¹⁷-VYY, GSAGPXXTPTKM:EPLP-AA¹⁷-VYY, AAPASXXVPARL:EPLP-AA¹⁷-VYY, STPPTXXVPTRL:EPLP-AA¹⁷-VYY, HVPKPXXAPTKL:EPLP-AA¹⁷-VYY, RVPSTXXAPVKT:EPLP-AA¹⁷-VYY, ASASPXXVSQDL:EPLP-AA¹⁷-VYY, NDEGLEXVPTEE:EPLP-AA¹⁷-VYY, NDEGLEXVPTGQ:EPLP-AA¹⁷-VYY, SSVKXQPSRVHH:EPLP-AA¹⁷-VYY, RNVQXRPTQVQL:EPLP-AA¹⁷-VYY, KIPKAXXVSQEL:EPLT-AA¹⁷-LYY, GIPEPXXVSQKM:EPLT-AA¹⁷-LYY, SIPKAXXVSQEL:EPLT-AA¹⁷-LYY, HVTKPTXVSQKL:EPLT-AA¹⁷-LYY, YVPKPXXVSQKL:EPLT-AA¹⁷-LYY, TVPKPXXVSQQL:EPLT-AA¹⁷-LYY, AVPKAXXVSQKL:EPLT-AA¹⁷-LYY, KVGKAXXVSQKL:EPLT-AA¹⁷-LYY, KASKAXXVSQKL:EPLT-AA¹⁷-LYY, GSAGPXXVSQKM:EPLT-AA¹⁷-LYY, AAPASXXVSQRL:EPLT-AA¹⁷-LYY, STPPTXXVSQRL:EPLT-AA¹⁷-LYY, HVPKPXXVSQKL:EPLT-AA¹⁷-LYY, RVPSTXXVSQKT:EPLT-AA¹⁷-LYY, ASAAPXXVSQAL:EPLT-AA¹⁷-LYY, ASASPXXVSQDL:EPLT-AA¹⁷-LYY, KIPKAXXVPTEL:EPLT-AA¹⁷-LYY, GIPEPXXVPEKM:EPLT-AA¹⁷-LYY, SIPKAXXVPTEL:EPLT-AA¹⁷-LYY, HVTKPTXAPTKL:EPLT-AA¹⁷-LYY, YVPKPXXAPTKL:EPLT-AA¹⁷-LYY, TVPKPXXAPTQL:EPLT-AA¹⁷-LYY, AVPKAXXAPTKL:EPLT-AA¹⁷-LYY, KVGKAXXVPTKL:EPLT-AA¹⁷-LYY, KASKAXXVPTKL:EPLT-AA¹⁷-LYY, GSAGPXXTPTKM:EPLT-AA¹⁷-LYY, AAPASXXVPARL:EPLT-AA¹⁷-LYY, STPPTXXVPTRL:EPLT-AA¹⁷-LYY, HVPKPXXAPTKL:EPLT-AA¹⁷-LYY, RVPSTXXAPVKT:EPLT-AA¹⁷-LYY, ASAAPXXVPQAL:EPLT-AA¹⁷-LYY, NDEGLEXVPTEE:EPLT-AA¹⁷-LYY, NDEGLEXVPTGQ:EPLT-AA¹⁷-LYY, SSVKXQPSRVHH:EPLT-AA¹⁷-LYY, RNVQXRPTQVQL:EPLT-AA¹⁷-LYY, KIPKAXXVPQEL:EPLT-AA¹⁷-LYY, GIPEPXXVPQKM:EPLT-AA¹⁷-LYY, SIPKAXXVPQEL:EPLT-AA¹⁷-LYY, HVTKPTXVPQKL:EPLT-AA¹⁷-LYY, YVPKPXXVPQKL:EPLT-AA¹⁷-LYY, TVPKPXXVPQQL:EPLT-AA¹⁷-LYY, AVPKAXXVPQKL:EPLT-AA¹⁷-LYY, KVGKAXXVPQKL:EPLT-AA¹⁷-LYY, KASKAXXVPQKL:EPLT-AA¹⁷-LYY, GSAGPXXVPQKM:EPLT-AA¹⁷-LYY, AAPASXXVPQRL:EPLT-AA¹⁷-LYY, STPPTXXVPQRL:EPLT-AA¹⁷-LYY, HVPKPXXVPQKL:EPLT-AA¹⁷-LYY, RVPSTXXVPQKT:EPLT-AA¹⁷-LYY, ASASPXXVPQDL:EPLT-AA¹⁷-LYY, NDEGLEXVPTGQ:SNIT-AA¹⁷-QIM, GIPEPXXVPEKM:SNIT-AA¹⁷-QIM, HVTKPTXAPTKL:SNIT-AA¹⁷-QIM, YVPKPXXAPTKL:SNIT-AA¹⁷-QIM, TVPKPXXAPTQL:SNIT-AA¹⁷-QIM, AVPKAXXAPTKL:SNIT-AA¹⁷-QIM, GSAGPXXTPTKM:SNIT-AA¹⁷-QIM, AAPASXXVPARL:SNIT-AA¹⁷-QIM, HVPKPXXAPTKL:SNIT-AA¹⁷-QIM, RVPSTXXAPVKT:SNIT-AA¹⁷-QIM, ASAAPXXVPQAL:SNIT-AA¹⁷-QIM, ASASPXXVSQDL:SNIT-AA¹⁷-QIM, ASASPXXVPQDL:SNIT-AA¹⁷-QIM, SSVKXQPSRVHH:SNIT-AA¹⁷-QIM, RNVQXRPTQVQL:SNIT-AA¹⁷-QIM, RNVQXRPSRVQL:RSVK-AA¹⁷-AKV, KIPKAXXVPTEL:RSVK-AA¹⁷-AKV, GIPEPXXVPEKM:RSVK-AA¹⁷-AKV, SIPKAXXVPTEL:RSVK-AA¹⁷-AKV, HVTKPTXAPTKL:RSVK-AA¹⁷-AKV, YVPKPXXAPTKL:RSVK-AA¹⁷-AKV, TVPKPXXAPTQL:RSVK-AA¹⁷-AKV, AVPKAXXAPTKL:RSVK-AA¹⁷-AKV, KVGKAXXVPTKL:RSVK-AA¹⁷-AKV, KASKAXXVPTKL:RSVK-AA¹⁷-AKV, GSAGPXXTPTKM:RSVK-AA¹⁷-AKV, AAPASXXVPARL:RSVK-AA¹⁷-AKV, STPPTXXVPTRL:RSVK-AA¹⁷-AKV, HVPKPXXAPTKL:RSVK-AA¹⁷-AKV, RVPSTXXAPVKT:RSVK-AA¹⁷-AKV, ASAAPXXVPQAL:RSVK-AA¹⁷-AKV, ASASPXXVSQDL:RSVK-AA¹⁷-AKV, ASASPXXVPQDL:RSVK-AA¹⁷-AKV, NDEGLEXVPTEE:RSVK-AA¹⁷-AKV, NDEGLEXVPTGQ:RSVK-AA¹⁷-AKV, RNVQXRPTQVQL:RSVK-AA¹⁷-AKV, SSVKXQPTQVHH:RPVQ-AA¹⁷-RKI, KIPKAXXVPTEL:RPVQ-AA¹⁷-RKI, GIPEPXXVPEKM:RPVQ-AA¹⁷-RKI, SIPKAXXVPTEL:RPVQ-AA¹⁷-RKI, HVTKPTXAPTKL:RPVQ-AA¹⁷-RKI, YVPKPXXAPTKL:RPVQ-AA¹⁷-RKI, TVPKPXXAPTQL:RPVQ-AA¹⁷-RKI, AVPKAXXAPTKL:RPVQ-AA¹⁷-RKI, KVGKAXXVPTKL:RPVQ-AA¹⁷-RKI, KASKAXXVPTKL:RPVQ-AA¹⁷-RKI, GSAGPXXTPTKM:RPVQ-AA¹⁷-RKI, AAPASXXVPARL:RPVQ-AA¹⁷-RKI, STPPTXXVPTRL:RPVQ-AA¹⁷-RKI, HVPKPXXAPTKL:RPVQ-AA¹⁷-RKI, RVPSTXXAPVKT:RPVQ-AA¹⁷-RKI, ASAAPXXVPQAL:RPVQ-AA¹⁷-RKI, ASASPXXVSQDL:RPVQ-AA¹⁷-RKI, ASASPXXVPQDL:RPVQ-AA¹⁷-RKI, NDEGLEXVPTEE:RPVQ-AA¹⁷-RKI, NDEGLEXVPTGQ:RPVQ-AA¹⁷-RKI and SSVKXQPSRVHH:RPVQ-AA¹⁷-RKI; and wherein AA¹⁷ is selected from the group consisting of G, A, V, L, I, P, F, M, W, T and S (in particular is selected from the group consisting of M, I, L, V and T).

[0411] In certain embodiments, the triplet PEP7:PEP3:PEP1 is selected from the group consisting of GIPEPXX:VPT:SAIS, HVTKPTX:VPT:SAIS, YVPKPXX:VPT:SAIS, TVPKPXX:VPT:SAIS, AVPKAXX:VPT:SAIS, KVGKAXX:VPT:SAIS, KASKAXX:VPT:SAIS, GSAGPXX:VPT:SAIS, AAPASXX:VPT:SAIS, STPPTXX:VPT:SAIS, HVPKPXX:VPT:SAIS, RVPSTXX:VPT:SAIS, ASAAPXX:VPT:SAIS, ASASPXX:VPT:SAIS, GIPEPXX:VPE:SAIS, HVTKPTX:APT:SAIS, YVPKPXX:APT:SAIS, TVPKPXX:APT:SAIS, AVPKAXX:APT:SAIS, GSAGPXX:TPT:SAIS, AAPASXX:VPA:SAIS, HVPKPXX:APT:SAIS, RVPSTXX:APV:SAIS, ASAAPXX:VPQ:SAIS, ASASPXX:VSQ:SAIS, ASASPXX:VPQ:SAIS, SSVKXQP:SRV:SAIS, RNVQXRP:TQV:SAIS, KIPKAXX:VPE:SSLS, SIPKAXX:VPE:SSLS, HVTKPTX:VPE:SSLS, YVPKPXX:VPE:SSLS, TVPKPXX:VPE:SSLS, AVPKAXX:VPE:SSLS, KVGKAXX:VPE:SSLS, KASKAXX:VPE:SSLS, GSAGPXX:VPE:SSLS, AAPASXX:VPE:SSLS, STPPTXX:VPE:SSLS, HVPKPXX:VPE:SSLS, RVPSTXX:VPE:SSLS, ASAAPXX:VPE:SSLS, ASASPXX:VPE:SSLS, KIPKAXX:VPT:SSLS, SIPKAXX:VPT:SSLS, HVTKPTX:APT:SSLS, YVPKPXX:APT:SSLS, TVPKPXX:APT:SSLS, AVPKAXX:APT:SSLS, KVGKAXX:VPT:SSLS, KASKAXX:VPT:SSLS, GSAGPXX:TPT:SSLS, AAPASXX:VPA:SSLS, STPPTXX:VPT:SSLS, HVPKPXX:APT:SSLS, RVPSTXX:APV:SSLS, ASAAPXX:VPQ:SSLS, ASASPXX:VSQ:SSLS, ASASPXX:VPQ:SSLS, NDEGLEX:VPT:SSLS, SSVKXQP:SRV:SSLS, RNVQXRP:TQV:SSLS, KIPKAXX:APT:NAIS, GIPEPXX:APT:NAIS, SIPKAXX:APT:NAIS, AVPKAXX:APT:NAIS, KVGKAXX:APT:NAIS, KASKAXX:APT:NAIS, GSAGPXX:APT:NAIS, AAPASXX:APT:NAIS, STPPTXX:APT:NAIS, RVPSTXX:APT:NAIS, ASAAPXX:APT:NAIS, ASASPXX:APT:NAIS, KIPKAXX:VPT:NAIS, GIPEPXX:VPE:NAIS, SIPKAXX:VPT:NAIS, KVGKAXX:VPT:NAIS, KASKAXX:VPT:NAIS, GSAGPXX:TPT:NAIS, AAPASXX:VPA:NAIS, STPPTXX:VPT:NAIS, RVPSTXX:APV:NAIS, ASAAPXX:VPQ:NAIS, ASASPXX:VSQ:NAIS, ASASPXX:VPQ:NAIS, NDEGLEX:VPT:NAIS, SSVKXQP:SRV:NAIS, RNVQXRP:TQV:NAIS, KIPKAXX:APT:SATS, GIPEPXX:APT:SATS, SIPKAXX:APT:SATS, HVTKPTX:APT:SATS, YVPKPXX:APT:SATS, TVPKPXX:APT:SATS, KVGKAXX:APT:SATS, KASKAXX:APT:SATS, GSAGPXX:APT:SATS, AAPASXX:APT:SATS, STPPTXX:APT:SATS, HVPKPXX:APT:SATS, RVPSTXX:APT:SATS, ASAAPXX:APT:SATS, ASASPXX:APT:SATS, KIPKAXX:VPT:SATS, GIPEPXX:VPE:SATS, SIPKAXX:VPT:SATS, KVGKAXX:VPT:SATS, KASKAXX:VPT:SATS, GSAGPXX:TPT:SATS, AAPASXX:VPA:SATS, STPPTXX:VPT:SATS, RVPSTXX:APV:SATS, ASAAPXX:VPQ:SATS, ASASPXX:VSQ:SATS, ASASPXX:VPQ:SATS, NDEGLEX:VPT:SATS, SSVKXQP:SRV:SATS, RNVQXRP:TQV:SATS, KIPKAXX:VPT:SPIS, GIPEPXX:VPT:SPIS, SIPKAXX:VPT:SPIS, HVTKPTX:VPT:SPIS, YVPKPXX:VPT:SPIS, TVPKPXX:VPT:SPIS, AVPKAXX:VPT:SPIS, KASKAXX:VPT:SPIS, GSAGPXX:VPT:SPIS, AAPASXX:VPT:SPIS, STPPTXX:VPT:SPIS, HVPKPXX:VPT:SPIS, RVPSTXX:VPT:SPIS, ASAAPXX:VPT:SPIS, ASASPXX:VPT:SPIS, GIPEPXX:VPE:SPIS, HVTKPTX:APT:SPIS, YVPKPXX:APT:SPIS, TVPKPXX:APT:SPIS, AVPKAXX:APT:SPIS, GSAGPXX:TPT:SPIS, AAPASXX:VPA:SPIS, HVPKPXX:APT:SPIS, RVPSTXX:APV:SPIS, ASAAPXX:VPQ:SPIS, ASASPXX:VSQ:SPIS, ASASPXX:VPQ:SPIS, SSVKXQP:SRV:SPIS, RNVQXRP:TQV:SPIS, KIPKAXX:VPT:EPIS, GIPEPXX:VPT:EPIS, SIPKAXX:VPT:EPIS, HVTKPTX:VPT:EPIS, YVPKPXX:VPT:EPIS, TVPKPXX:VPT:EPIS, AVPKAXX:VPT:EPIS, KVGKAXX:VPT:EPIS, GSAGPXX:VPT:EPIS, AAPASXX:VPT:EPIS, STPPTXX:VPT:EPIS, HVPKPXX:VPT:EPIS, RVPSTXX:VPT:EPIS, ASAAPXX:VPT:EPIS, ASASPXX:VPT:EPIS, GIPEPXX:VPE:EPIS, HVTKPTX:APT:EPIS, YVPKPXX:APT:EPIS, TVPKPXX:APT:EPIS, AVPKAXX:APT:EPIS, GSAGPXX:TPT:EPIS, AAPASXX:VPA:EPIS, HVPKPXX:APT:EPIS, RVPSTXX:APV:EPIS, ASAAPXX:VPQ:EPIS, ASASPXX:VSQ:EPIS, ASASPXX:VPQ:EPIS, SSVKXQP:SRV:EPIS, RNVQXRP:TQV:EPIS, KIPKAXX:TPT:SPIN, GIPEPXX:TPT:SPIN, SIPKAXX:TPT:SPIN, HVTKPTX:TPT:SPIN, YVPKPXX:TPT:SPIN, TVPKPXX:TPT:SPIN, AVPKAXX:TPT:SPIN, KVGKAXX:TPT:SPIN, KASKAXX:TPT:SPIN, AAPASXX:TPT:SPIN, STPPTXX:TPT:SPIN, HVPKPXX:TPT:SPIN, RVPSTXX:TPT:SPIN, ASAAPXX:TPT:SPIN, ASASPXX:TPT:SPIN, KIPKAXX:VPT:SPIN, GIPEPXX:VPE:SPIN, SIPKAXX:VPT:SPIN, HVTKPTX:APT:SPIN, YVPKPXX:APT:SPIN, TVPKPXX:APT:SPIN, AVPKAXX:APT:SPIN, KVGKAXX:VPT:SPIN, KASKAXX:VPT:SPIN, AAPASXX:VPA:SPIN, STPPTXX:VPT:SPIN, HVPKPXX:APT:SPIN, RVPSTXX:APV:SPIN, ASAAPXX:VPQ:SPIN, ASASPXX:VSQ:SPIN, ASASPXX:VPQ:SPIN, NDEGLEX:VPT:SPIN, SSVKXQP:SRV:SPIN, RNVQXRP:TQV:SPIN, KIPKAXX:VPA:SPIS, GIPEPXX:VPA:SPIS, SIPKAXX:VPA:SPIS, HVTKPTX:VPA:SPIS, YVPKPXX:VPA:SPIS, TVPKPXX:VPA:SPIS, AVPKAXX:VPA:SPIS, KVGKAXX:VPA:SPIS, KASKAXX:VPA:SPIS, GSAGPXX:VPA:SPIS, STPPTXX:VPA:SPIS, HVPKPXX:VPA:SPIS, RVPSTXX:VPA:SPIS, ASAAPXX:VPA:SPIS, ASASPXX:VPA:SPIS, KVGKAXX:VPT:SPIS, NDEGLEX:VPT:SPIS, KIPKAXX:APV:KPLS, GIPEPXX:APV:KPLS, SIPKAXX:APV:KPLS, HVTKPTX:APV:KPLS, YVPKPXX:APV:KPLS, TVPKPXX:APV:KPLS, AVPKAXX:APV:KPLS, KVGKAXX:APV:KPLS, KASKAXX:APV:KPLS, GSAGPXX:APV:KPLS, AAPASXX:APV:KPLS, STPPTXX:APV:KPLS, HVPKPXX:APV:KPLS, ASAAPXX:APV:KPLS, ASASPXX:APV:KPLS, KIPKAXX:VPT:KPLS, GIPEPXX:VPE:KPLS, SIPKAXX:VPT:KPLS, HVTKPTX:APT:KPLS, YVPKPXX:APT:KPLS, TVPKPXX:APT:KPLS, AVPKAXX:APT:KPLS, KVGKAXX:VPT:KPLS, KASKAXX:VPT:KPLS, GSAGPXX:TPT:KPLS, AAPASXX:VPA:KPLS, STPPTXX:VPT:KPLS, HVPKPXX:APT:KPLS, ASAAPXX:VPQ:KPLS, ASASPXX:VSQ:KPLS, ASASPXX:VPQ:KPLS, NDEGLEX:VPT:KPLS, SSVKXQP:SRV:KPLS, RNVQXRP:TQV:KPLS, KIPKAXX:VPQ:EPLP, GIPEPXX:VPQ:EPLP, SIPKAXX:VPQ:EPLP, HVTKPTX:VPQ:EPLP, YVPKPXX:VPQ:EPLP, TVPKPXX:VPQ:EPLP, AVPKAXX:VPQ:EPLP, KVGKAXX:VPQ:EPLP, KASKAXX:VPQ:EPLP, GSAGPXX:VPQ:EPLP, AAPASXX:VPQ:EPLP, STPPTXX:VPQ:EPLP, HVPKPXX:VPQ:EPLP, RVPSTXX:VPQ:EPLP, ASASPXX:VPQ:EPLP, KIPKAXX:VPT:EPLP, GIPEPXX:VPE:EPLP, SIPKAXX:VPT:EPLP, HVTKPTX:APT:EPLP, YVPKPXX:APT:EPLP, TVPKPXX:APT:EPLP, AVPKAXX:APT:EPLP, KVGKAXX:VPT:EPLP, KASKAXX:VPT:EPLP, GSAGPXX:TPT:EPLP, AAPASXX:VPA:EPLP STPPTXX:VPT:EPLP, HVPKPXX:APT:EPLP, RVPSTXX:APV:EPLP, ASASPXX:VSQ:EPLP, NDEGLEX:VPT:EPLP, SSVKXQP:SRV:EPLP, RNVQXRP:TQV:EPLP, KIPKAXX:VSQ:EPLT, GIPEPXX:VSQ:EPLT, SIPKAXX:VSQ:EPLT, HVTKPTX:VSQ:EPLT, YVPKPXX:VSQ:EPLT, TVPKPXX:VSQ:EPLT, AVPKAXX:VSQ:EPLT, KVGKAXX:VSQ:EPLT, KASKAXX:VSQ:EPLT, GSAGPXX:VSQ:EPLT, AAPASXX:VSQ:EPLT, STPPTXX:VSQ:EPLT, HVPKPXX:VSQ:EPLT, RVPSTXX:VSQ:EPLT, ASAAPXX:VSQ:EPLT, ASASPXX:VSQ:EPLT, KIPKAXX:VPT:EPLT, GIPEPXX:VPE:EPLT, SIPKAXX:VPT:EPLT, HVTKPTX:APT:EPLT, YVPKPXX:APT:EPLT, TVPKPXX:APT:EPLT, AVPKAXX:APT:EPLT, KVGKAXX:VPT:EPLT, KASKAXX:VPT:EPLT, GSAGPXX:TPT:EPLT, AAPASXX:VPA:EPLT, STPPTXX:VPT:EPLT, HVPKPXX:APT:EPLT, RVPSTXX:APV:EPLT, ASAAPXX:VPQ:EPLT, NDEGLEX:VPT:EPLT, SSVKXQP:SRV:EPLT, RNVQXRP:TQV:EPLT, KIPKAXX:VPQ:EPLT, GIPEPXX:VPQ:EPLT, SIPKAXX:VPQ:EPLT, HVTKPTX:VPQ:EPLT, YVPKPXX:VPQ:EPLT, TVPKPXX:VPQ:EPLT, AVPKAXX:VPQ:EPLT, KVGKAXX:VPQ:EPLT, KASKAXX:VPQ:EPLT, GSAGPXX:VPQ:EPLT, AAPASXX:VPQ:EPLT, STPPTXX:VPQ:EPLT, HVPKPXX:VPQ:EPLT, RVPSTXX:VPQ:EPLT, ASASPXX:VPQ:EPLT, NDEGLEX:VPT:SNIT, GIPEPXX:VPE:SNIT, HVTKPTX:APT:SNIT, YVPKPXX:APT:SNIT, TVPKPXX:APT:SNIT, AVPKAXX:APT:SNIT, GSAGPXX:TPT:SNIT, AAPASXX:VPA:SNIT, HVPKPXX:APT:SNIT, RVPSTXX:APV:SNIT, ASAAPXX:VPQ:SNIT, ASASPXX:VSQ:SNIT, ASASPXX:VPQ:SNIT, SSVKXQP:SRV:SNIT, RNVQXRP:TQV:SNIT, RNVQXRP:SRV:RSVK, KIPKAXX:VPT:RSVK, GIPEPXX:VPE:RSVK, SIPKAXX:VPT:RSVK, HVTKPTX:APT:RSVK, YVPKPXX:APT:RSVK, TVPKPXX:APT:RSVK, AVPKAXX:APT:RSVK, KVGKAXX:VPT:RSVK, KASKAXX:VPT:RSVK, GSAGPXX:TPT:RSVK, AAPASXX:VPA:RSVK, STPPTXX:VPT:RSVK, HVPKPXX:APT:RSVK, RVPSTXX:APV:RSVK, ASAAPXX:VPQ:RSVK, ASASPXX:VSQ:RSVK, ASASPXX:VPQ:RSVK, NDEGLEX:VPT:RSVK, RNVQXRP:TQV:RSVK, SSVKXQP:TQV:RPVQ, KIPKAXX:VPT:RPVQ, GIPEPXX:VPE:RPVQ, SIPKAXX:VPT:RPVQ, HVTKPTX:APT:RPVQ, YVPKPXX:APT:RPVQ, TVPKPXX:APT:RPVQ, AVPKAXX:APT:RPVQ, KVGKAXX:VPT:RPVQ, KASKAXX:VPT:RPVQ, GSAGPXX:TPT:RPVQ, AAPASXX:VPA:RPVQ, STPPTXX:VPT:RPVQ, HVPKPXX:APT:RPVQ, RVPSTXX:APV:RPVQ, ASAAPXX:VPQ:RPVQ, ASASPXX:VSQ:RPVQ, ASASPXX:VPQ:RPVQ, NDEGLEX:VPT:RPVQ and SSVKXQP:SRV:RPVQ.

[0412] In certain embodiments, the triplet PEP7:PEP3:PEP12 is selected from the group consisting of GIPEPXX:VPT:SAIS-AA¹⁷-LYL, HVTKPTX:VPT:SAIS-AA¹⁷-LYL, YVPKPXX:VPT:SAIS-AA¹⁷-LYL, TVPKPXX:VPT:SAIS-AA¹⁷-LYL, AVPKAXX:VPT:SAIS-AA¹⁷-LYL, KVGKAXX:VPT:SAIS-AA¹⁷-LYL, KASKAXX:VPT:SAIS-AA¹⁷-LYL, GSAGPXX:VPT:SAIS-AA¹⁷-LYL, AAPASXX:VPT:SAIS-AA¹⁷-LYL, STPPTXX:VPT:SAIS-AA¹⁷-LYL, HVPKPXX:VPT:SAIS-AA¹⁷-LYL, RVPSTXX:VPT:SAIS-AA¹⁷-LYL, ASAAPXX:VPT:SAIS-AA¹⁷-LYL, ASASPXX:VPT:SAIS-AA¹⁷-LYL, GIPEPXX:VPE:SAIS-AA¹⁷-LYL, HVTKPTX:APT:SAIS-AA¹⁷-LYL, YVPKPXX:APT:SAIS-AA¹⁷-LYL, TVPKPXX:APT:SAIS-AA¹⁷-LYL, AVPKAXX:APT:SAIS-AA¹⁷-LYL, GSAGPXX:TPT:SAIS-AA¹⁷-LYL, AAPASXX:VPA:SAIS-AA¹⁷-LYL, HVPKPXX:APT:SAIS-AA¹⁷-LYL, RVPSTXX:APV:SAIS-AA¹⁷-LYL, ASAAPXX:VPQ:SAIS-AA¹⁷-LYL, ASASPXX:VSQ:SAIS-AA¹⁷-LYL, ASASPXX:VPQ:SAIS-AA¹⁷-LYL, SSVKXQP:SRV:SAIS-AA¹⁷-LYL, RNVQXRP:TQV:SAIS-AA¹⁷-LYL, KIPKAXX:VPE:SSLS-AA¹⁷-LFF, SIPKAXX:VPE:SSLS-AA¹⁷-LFF, HVTKPTX:VPE:SSLS-AA¹⁷-LFF, YVPKPXX:VPE:SSLS-AA¹⁷-LFF, TVPKPXX:VPE:SSLS-AA¹⁷-LFF, AVPKAXX:VPE:SSLS-AA¹⁷-LFF, KVGKAXX:VPE:SSLS-AA¹⁷-LFF, KASKAXX:VPE:SSLS-AA¹⁷-LFF, GSAGPXX:VPE:SSLS-AA¹⁷-LFF, AAPASXX:VPE:SSLS-AA¹⁷-LFF, STPPTXX:VPE:SSLS-AA¹⁷-LFF, HVPKPXX:VPE:SSLS-AA¹⁷-LFF, RVPSTXX:VPE:SSLS-AA¹⁷-LFF, ASAAPXX:VPE:SSLS-AA¹⁷-LFF, ASASPXX:VPE:SSLS-AA¹⁷-LFF, KIPKAXX:VPT:SSLS-AA¹⁷-LFF, SIPKAXX:VPT:SSLS-AA¹⁷-LFF, HVTKPTX:APT:SSLS-AA¹⁷-LFF, YVPKPXX:APT:SSLS-AA¹⁷-LFF, TVPKPXX:APT:SSLS-AA¹⁷-LFF, AVPKAXX:APT:SSLS-AA¹⁷-LFF, KVGKAXX:VPT:SSLS-AA¹⁷-LFF, KASKAXX:VPT:SSLS-AA¹⁷-LFF, GSAGPXX:TPT:SSLS-AA¹⁷-LFF, AAPASXX:VPA:SSLS-AA¹⁷-LFF, STPPTXX:VPT:SSLS-AA¹⁷-LFF, HVPKPXX:APT:SSLS-AA¹⁷-LFF, RVPSTXX:APV:SSLS-AA¹⁷-LFF, ASAAPXX:VPQ:SSLS-AA¹⁷-LFF, ASASPXX:VSQ:SSLS-AA¹⁷-LFF, ASASPXX:VPQ:SSLS-AA¹⁷-LFF, NDEGLEX:VPT:SSLS-AA¹⁷-LFF, SSVKXQP:SRV:SSLS-AA¹⁷-LFF, RNVQXRP:TQV:SSLS-AA¹⁷-LFF, KIPKAXX:APT:NAIS-AA¹⁷-LYF, GIPEPXX:APT:NAIS-AA¹⁷-LYF, SIPKAXX:APT:NAIS-AA¹⁷-LYF, AVPKAXX:APT:NAIS-AA¹⁷-LYF, KVGKAXX:APT:NAIS-AA¹⁷-LYF, KASKAXX:APT:NAIS-AA¹⁷-LYF, GSAGPXX:APT:NAIS-AA¹⁷-LYF, AAPASXX:APT:NAIS-AA¹⁷-LYF, STPPTXX:APT:NAIS-AA¹⁷-LYF, RVPSTXX:APT:NAIS-AA¹⁷-LYF, ASAAPXX:APT:NAIS-AA¹⁷-LYF, ASASPXX:APT:NAIS-AA¹⁷-LYF, KIPKAXX:VPT:NAIS-AA¹⁷-LYF, GIPEPXX:VPE:NAIS-AA¹⁷-LYF, SIPKAXX:VPT:NAIS-AA¹⁷-LYF, KVGKAXX:VPT:NAIS-AA¹⁷-LYF, KASKAXX:VPT:NAIS-AA¹⁷-LYF, GSAGPXX:TPT:NAIS-AA¹⁷-LYF, AAPASXX:VPA:NAIS-AA¹⁷-LYF, STPPTXX:VPT:NAIS-AA¹⁷-LYF, RVPSTXX:APV:NAIS-AA¹⁷-LYF, ASAAPXX:VPQ:NAIS-AA¹⁷-LYF, ASASPXX:VSQ:NAIS-AA¹⁷-LYF, ASASPXX:VPQ:NAIS-AA¹⁷-LYF, NDEGLEX:VPT:NAIS-AA¹⁷-LYF, SSVKXQP:SRV:NAIS-AA¹⁷-LYF, RNVQXRP:TQV:NAIS-AA¹⁷-LYF, KIPKAXX:APT:SATS-AA¹⁷-LYY, GIPEPXX:APT:SATS-AA¹⁷-LYY, SIPKAXX:APT:SATS-AA¹⁷-LYY, HVTKPTX:APT:SATS-AA¹⁷-LYY, YVPKPXX:APT:SATS-AA¹⁷-LYY, TVPKPXX:APT:SATS-AA¹⁷-LYY, KVGKAXX:APT:SATS-AA¹⁷-LYY, KASKAXX:APT:SATS-AA¹⁷-LYY, GSAGPXX:APT:SATS-AA¹⁷-LYY, AAPASXX:APT:SATS-AA¹⁷-LYY, STPPTXX:APT:SATS-AA¹⁷-LYY, HVPKPXX:APT:SATS-AA¹⁷-LYY, RVPSTXX:APT:SATS-AA¹⁷-LYY, ASAAPXX:APT:SATS-AA¹⁷-LYY, ASASAPXX:APT:SATS-AA¹⁷-LYY, KIPKAXX:VPT:SATS-AA¹⁷-LYY, GIPEPXX:VPE:SATS-AA¹⁷-LYY, SIPKAXX:VPT:SATS-AA¹⁷-LYY, KVGKAXX:VPT:SATS-AA¹⁷-LYY, KASKAXX:VPT:SATS-AA¹⁷-LYY, GSAGPXX:TPT:SATS-AA¹⁷-LYY, AAPASXX:VPA:SATS-AA¹⁷-LYY, STPPTXX:VPT:SATS-AA¹⁷-LYY, RVPSTXX:APV:SATS-AA¹⁷-LYY, ASAAPXX:VPQ:SATS-AA¹⁷-LYY, ASASPXX:VSQ:SATS-AA¹⁷-LYY, ASASPXX:VPQ:SATS-AA¹⁷-LYY, NDEGLEX:VPT:SATS-AA¹⁷-LYY, SSVKXQP:SRV:SATS-AA¹⁷-LYY, RNVQXRP:TQV:SATS-AA¹⁷-LYY, KIPKAXX:VPT:SPIS-AA¹⁷-LYK, GIPEPXX:VPT:SPIS-AA¹⁷-LYK, SIPKAXX:VPT:SPIS-AA¹⁷-LYK, HVTKPTX:VPT:SPIS-AA¹⁷-LYK, YVPKPXX:VPT:SPIS-AA¹⁷-LYK, TVPKPXX:VPT:SPIS-AA¹⁷-LYK, AVPKAXX:VPT:SPIS-AA¹⁷-LYK, KASKAXX:VPT:SPIS-AA¹⁷-LYK, GSAGPXX:VPT:SPIS-AA¹⁷-LYK, AAPASXX:VPT:SPIS-AA¹⁷-LYK, STPPTXX:VPT:SPIS-AA¹⁷-LYK, HVPKPXX:VPT:SPIS-AA¹⁷-LYK, RVPSTXX:VPT:SPIS-AA¹⁷-LYK, ASAAPXX:VPT:SPIS-AA¹⁷-LYK, ASASPXX:VPT:SPIS-AA¹⁷-LYK, GIPEPXX:VPE:SPIS-AA¹⁷-LYK, HVTKPTX:APT:SPIS-AA¹⁷-LYK, YVPKPXX:APT:SPIS-AA¹⁷-LYK, TVPKPXX:APT:SPIS-AA¹⁷-LYK, AVPKAXX:APT:SPIS-AA¹⁷-LYK, GSAGPXX:TPT:SPIS-AA¹⁷-LYK, AAPASXX:VPA:SPIS-AA¹⁷-LYK, HVPKPXX:APT:SPIS-AA¹⁷-LYK, RVPSTXX:APV:SPIS-AA¹⁷-LYK, ASAAPXX:VPQ:SPIS-AA¹⁷-LYK, ASASPXX:VSQ:SPIS-AA¹⁷-LYK, ASASPXX:VPQ:SPIS-AA¹⁷-LYK, SSVKXQP:SRV:SPIS-AA¹⁷-LYK, RNVQXRP:TQV:SPIS-AA¹⁷-LYK, KIPKAXX:VPT:EPIS-AA¹⁷-LYL, GIPEPXX:VPT:EPIS-AA¹⁷-LYL, SIPKAXX:VPT:EPIS-AA¹⁷-LYL, HVTKPTX:VPT:EPIS-AA¹⁷-LYL, YVPKPXX:VPT:EPIS-AA¹⁷-LYL, TVPKPXX:VPT:EPIS-AA¹⁷-LYL, AVPKAXX:VPT:EPIS-AA¹⁷-LYL, KVGKAXX:VPT:EPIS-AA¹⁷-LYL, GSAGPXX:VPT:EPIS-AA¹⁷-LYL, AAPASXX:VPT:EPIS-AA¹⁷-LYL, STPPTXX:VPT:EPIS-AA¹⁷-LYL, HVPKPXX:VPT:EPIS-AA¹⁷-LYL, RVPSTXX:VPT:EPIS-AA¹⁷-LYL, ASAAPXX:VPT:EPIS-AA¹⁷-LYL, ASASPXX:VPT:EPIS-AA¹⁷-LYL, GIPEPXX:VPE:EPIS-AA¹⁷-LYL, HVTKPTX:APT:EPIS-AA¹⁷-LYL, YVPKPXX:APT:EPIS-AA¹⁷-LYL, TVPKPXX:APT:EPIS-AA¹⁷-LYL, AVPKAXX:APT:EPIS-AA¹⁷-LYL, GSAGPXX:TPT:EPIS-AA¹⁷-LYL, AAPASXX:VPA:EPIS-AA¹⁷-LYL, HVPKPXX:APT:EPIS-AA¹⁷-LYL, RVPSTXX:APV:EPIS-AA¹⁷-LYL, ASAAPXX:VPQ:EPIS-AA¹⁷-LYL, ASASPXX:VSQ:EPIS-AA¹⁷-LYL, ASASPXX:VPQ:EPIS-AA¹⁷-LYL, SSVKXQP:SRV:EPIS-AA¹⁷-LYL, RNVQXRP:TQV:EPIS-AA¹⁷-LYL, KIPKAXX:TPT:SPIN-AA¹⁷-LYF, GIPEPXX:TPT:SPIN-AA¹⁷-LYF, SIPKAXX:TPT:SPIN-AA¹⁷-LYF, HVTKPTX:TPT:SPIN-AA¹⁷-LYF, YVPKPXX:TPT:SPIN-AA¹⁷-LYF, TVPKPXX:TPT:SPIN-AA¹⁷-LYF, AVPKAXX:TPT:SPIN-AA¹⁷-LYF, KVGKAXX:TPT:SPIN-AA¹⁷-LYF, KASKAXX:TPT:SPIN-AA¹⁷-LYF, AAPASXX:TPT:SPIN-AA¹⁷-LYF, STPPTXX:TPT:SPIN-AA¹⁷-LYF, HVPKPXX:TPT:SPIN-AA¹⁷-LYF, RVPSTXX:TPT:SPIN-AA¹⁷-LYF, ASAAPXX:TPT:SPIN-AA¹⁷-LYF, ASASPXX:TPT:SPIN-AA¹⁷-LYF, KIPKAXX:VPT:SPIN-AA¹⁷-LYF, GIPEPXX:VPE:SPIN-AA¹⁷-LYF, SIPKAXX:VPT:SPIN-AA¹⁷-LYF, HVTKPTX:APT:SPIN-AA¹⁷-LYF, YVPKPXX:APT:SPIN-AA¹⁷-LYF, TVPKPXX:APT:SPIN-AA¹⁷-LYF, AVPKAXX:APT:SPIN-AA¹⁷-LYF, KVGKAXX:VPT:SPIN-AA¹⁷-LYF, KASKAXX:VPT:SPIN-AA¹⁷-LYF, AAPASXX:VPA:SPIN-AA¹⁷-LYF, STPPTXX:VPT:SPIN-AA¹⁷-LYF, HVPKPXX:APT:SPIN-AA¹⁷-LYF, RVPSTXX:APV:SPIN-AA¹⁷-LYF, ASAAPXX:VPQ:SPIN-AA¹⁷-LYF, ASASPXX:VSQ:SPIN-AA¹⁷-LYF, ASASPXX:VPQ:SPIN-AA¹⁷-LYF, NDEGLEX:VPT:SPIN-AA¹⁷-LYF, SSVKXQP:SRV:SPIN-AA¹⁷-LYF, RNVQXRP:TQV:SPIN-AA¹⁷-LYF, KIPKAXX:VPA:SPIS-AA¹⁷-LYI, GIPEPXX:VPA:SPIS-AA¹⁷-LYI, SIPKAXX:VPA:SPIS-AA¹⁷-LYI, HVTKPTX:VPA:SPIS-AA¹⁷-LYI, YVPKPXX:VPA:SPIS-AA¹⁷-LYI, TVPKPXX:VPA:SPIS-AA¹⁷-LYI, AVPKAXX:VPA:SPIS-AA¹⁷-LYI, KVGKAXX:VPA:SPIS-AA¹⁷-LYI, KASKAXX:VPA:SPIS-AA¹⁷-LYI, GSAGPXX:VPA:SPIS-AA¹⁷-LYI, STPPTXX:VPA:SPIS-AA¹⁷-LYI, HVPKPXX:VPA:SPIS-AA¹⁷-LYI, RVPSTXX:VPA:SPIS-AA¹⁷-LYI, ASAAPXX:VPA:SPIS-AA¹⁷-LYI, ASASPXX:VPA:SPIS-AA¹⁷-LYI, KIPKAXX:VPT:SPIS-AA¹⁷-LYI, GIPEPXX:VPE:SPIS-AA¹⁷-LYI, SIPKAXX:VPT:SPIS-AA¹⁷-LYI, HVTKPTX:APT:SPIS-AA¹⁷-LYI, YVPKPXX:APT:SPIS-AA¹⁷-LYI, TVPKPXX:APT:SPIS-AA¹⁷-LYI, AVPKAXX:APT:SPIS-AA¹⁷-LYI, KVGKAXX:VPT:SPIS-AA¹⁷-LYI, KASKAXX:VPT:SPIS-AA¹⁷-LYI, GSAGPXX:TPT:SPIS-AA¹⁷-LYI, STPPTXX:VPT:SPIS-AA¹⁷-LYI, HVPKPXX:APT:SPIS-AA¹⁷-LYI, RVPSTXX:APV:SPIS-AA¹⁷-LYI, ASAAPXX:VPQ:SPIS-AA¹⁷-LYI, ASASPXX:VSQ:SPIS-AA¹⁷-LYI, ASASPXX:VPQ:SPIS-AA¹⁷-LYI, NDEGLEX:VPT:SPIS-AA¹⁷-LYI, SSVKXQP:SRV:SPIS-AA¹⁷-LYI, RNVQXRP:TQV:SPIS-AA¹⁷-LYI, KIPKAXX:VPT:SPIS-AA¹⁷-LFI, GIPEPXX:VPT:SPIS-AA¹⁷-LFI, SIPKAXX:VPT:SPIS-AA¹⁷-LFI, HVTKPTX:VPT:SPIS-AA¹⁷-LFI, YVPKPXX:VPT:SPIS-AA¹⁷-LFI, TVPKPXX:VPT:SPIS-AA¹⁷-LFI, AVPKAXX:VPT:SPIS-AA¹⁷-LFI, KVGKAXX:VPT:SPIS-AA¹⁷-LFI, KASKAXX:VPT:SPIS-AA¹⁷-LFI, GSAGPXX:VPT:SPIS-AA¹⁷-LFI, AAPASXX:VPT:SPIS-AA¹⁷-LFI, HVPKPXX:VPT:SPIS-AA¹⁷-LFI, RVPSTXX:VPT:SPIS-AA¹⁷-LFI, ASAAPXX:VPT:SPIS-AA¹⁷-LFI, ASASPXX:VPT:SPIS-AA¹⁷-LFI, GIPEPXX:VPE:SPIS-AA¹⁷-LFI, HVTKPTX:APT:SPIS-AA¹⁷-LFI, YVPKPXX:APT:SPIS-AA¹⁷-LFI, TVPKPXX:APT:SPIS-AA¹⁷-LFI, AVPKAXX:APT:SPIS-AA¹⁷-LFI, GSAGPXX:TPT:SPIS-AA¹⁷-LFI, AAPASXX:VPA:SPIS-AA¹⁷-LFI, HVPKPXX:APT:SPIS-AA¹⁷-LFI, RVPSTXX:APV:SPIS-AA¹⁷-LFI, ASAAPXX:VPQ:SPIS-AA¹⁷-LFI, ASASPXX:VSQ:SPIS-AA¹⁷-LFI, ASASPXX:VPQ:SPIS-AA¹⁷-LFI, SSVKXQP:SRV:SPIS-AA¹⁷-LFI, RNVQXRP:TQV:SPIS-AA¹⁷-LFI, KIPKAXX:APV:KPLS-AA¹⁷-LYV, GIPEPXX:APV:KPLS-AA¹⁷-LYV, SIPKAXX:APV:KPLS-AA¹⁷-LYV, HVTKPTX:APV:KPLS-AA¹⁷-LYV, YVPKPXX:APV:KPLS-AA¹⁷-LYV, TVPKPXX:APV:KPLS-AA¹⁷-LYV, AVPKAXX:APV:KPLS-AA¹⁷-LYV, KVGKAXX:APV:KPLS-AA¹⁷-LYV, KASKAXX:APV:KPLS-AA¹⁷-LYV, GSAGPXX:APV:KPLS-AA¹⁷-LYV, AAPASXX:APV:KPLS-AA¹⁷-LYV, STPPTXX:APV:KPLS-AA¹⁷-LYV, HVPKPXX:APV:KPLS-AA¹⁷-LYV, ASAAPXX:APV:KPLS-AA¹⁷-LYV, ASASPXX:APV:KPLS-AA¹⁷-LYV, KIPKAXX:VPT:KPLS-AA¹⁷-LYV, GIPEPXX:VPE:KPLS-AA¹⁷-LYV, SIPKAXX:VPT:KPLS-AA¹⁷-LYV, HVTKPTX:APT:KPLS-AA¹⁷-LYV, YVPKPXX:APT:KPLS-AA¹⁷-LYV, TVPKPXX:APT:KPLS-AA¹⁷-LYV, AVPKAXX:APT:KPLS-AA¹⁷-LYV, KVGKAXX:VPT:KPLS-AA¹⁷-LYV, KASKAXX:VPT:KPLS-AA¹⁷-LYV, GSAGPXX:TPT:KPLS-AA¹⁷-LYV, AAPASXX:VPA:KPLS-AA¹⁷-LYV, STPPTXX:VPT:KPLS-AA¹⁷-LYV, HVPKPXX:APT:KPLS-AA¹⁷-LYV, ASAAPXX:VPQ:KPLS-AA¹⁷-LYV, ASASPXX:VSQ:KPLS-AA¹⁷-LYV, ASASPXX:VPQ:KPLS-AA¹⁷-LYV, NDEGLEX:VPT:KPLS-AA¹⁷-LYV, SSVKXQP:SRV:KPLS-AA¹⁷-LYV, RNVQXRP:TQV:KPLS-AA¹⁷-LYV, KIPKAXX:VPQ:EPLP-AA¹⁷-VYY, GIPEPXX:VPQ:EPLP-AA¹⁷-VYY, SIPKAXX:VPQ:EPLP-AA¹⁷-VYY, HVTKPTX:VPQ:EPLP-AA¹⁷-VYY, YVPKPXX:VPQ:EPLP-AA¹⁷-VYY, TVPKPXX:VPQ:EPLP-AA¹⁷-VYY, AVPKAXX:VPQ:EPLP-AA¹⁷-VYY, KVGKAXX:VPQ:EPLP-AA¹⁷-VYY, KASKAXX:VPQ:EPLP-AA¹⁷-VYY, GSAGPXX:VPQ:EPLP-AA¹⁷-VYY, AAPASXX:VPQ:EPLP-AA¹⁷-VYY, STPPTXX:VPQ:EPLP-AA¹⁷-VYY, HVPKPXX:VPQ:EPLP-AA¹⁷-VYY, RVPSTXX:VPQ:EPLP-AA¹⁷-VYY, ASASPXX:VPQ:EPLP-AA¹⁷-VYY, KIPKAXX:VPT:EPLP-AA¹⁷-VYY, GIPEPXX:VPE:EPLP-AA¹⁷-VYY, SIPKAXX:VPT:EPLP-AA¹⁷-VYY, HVTKPTX:APT:EPLP-AA¹⁷-VYY, YVPKPXX:APT:EPLP-AA¹⁷-VYY, TVPKPXX:APT:EPLP-AA¹⁷-VYY, AVPKAXX:APT:EPLP-AA¹⁷-VYY, KVGKAXX:VPT:EPLP-AA¹⁷-VYY, KASKAXX:VPT:EPLP-AA¹⁷-VYY, GSAGPXX:TPT:EPLP-AA¹⁷-VYY, AAPASXX:VPA:EPLP-AA¹⁷-VYY, STPPTXX:VPT:EPLP-AA¹⁷-VYY, HVPKPXX:APT:EPLP-AA¹⁷-VYY, RVPSTXX:APV:EPLP-AA¹⁷-VYY, ASASPXX:VSQ:EPLP-AA¹⁷-VYY, NDEGLEX:VPT:EPLP-AA¹⁷-VYY, SSVKXQP:SRV:EPLP-AA¹⁷-VYY, RNVQXRP:TQV:EPLP-AA¹⁷-VYY, KIPKAXX:VSQ:EPLT-AA¹⁷-LYY, GIPEPXX:VSQ:EPLT-AA¹⁷-LYY, SIPKAXX:VSQ:EPLT-AA¹⁷-LYY, HVTKPTX:VSQ:EPLT-AA¹⁷-LYY, YVPKPXX:VSQ:EPLT-AA¹⁷-LYY, TVPKPXX:VSQ:EPLT-AA¹⁷-LYY, AVPKAXX:VSQ:EPLT-AA¹⁷-LYY, KVGKAXX:VSQ:EPLT-AA¹⁷-LYY, KASKAXX:VSQ:EPLT-AA¹⁷-LYY, GSAGPXX:VSQ:EPLT-AA¹⁷-LYY, AAPASXX:VSQ:EPLT-AA¹⁷-LYY, STPPTXX:VSQ:EPLT-AA¹⁷-LYY, HVPKPXX:VSQ:EPLT-AA¹⁷-LYY, RVPSTXX:VSQ:EPLT-AA¹⁷-LYY, ASAAPXX:VSQ:EPLT-AA¹⁷-LYY, ASASPXX:VSQ:EPLT-AA¹⁷-LYY, KIPKAXX:VPT:EPLT-AA¹⁷-LYY, GIPEPXX:VPE:EPLT-AA¹⁷-LYY, SIPKAXX:VPT:EPLT-AA¹⁷-LYY, HVTKPTX:APT:EPLT-AA¹⁷-LYY, YVPKPXX:APT:EPLT-AA¹⁷-LYY, TVPKPXX:APT:EPLT-AA¹⁷-LYY, AVPKAXX:APT:EPLT-AA¹⁷-LYY, KVGKAXX:VPT:EPLT-AA¹⁷-LYY, KASKAXX:VPT:EPLT-AA¹⁷-LYY, GSAGPXX:TPT:EPLT-AA¹⁷-LYY, AAPASXX:VPA:EPLT-AA¹⁷-LYY, STPPTXX:VPT:EPLT-AA¹⁷-LYY, HVPKPXX:APT:EPLT-AA¹⁷-LYY, RVPSTXX:APV:EPLT-AA¹⁷-LYY, ASAAPXX:VPQ:EPLT-AA¹⁷-LYY, NDEGLEX:VPT:EPLT-AA¹⁷-LYY, SSVKXQP:SRV:EPLT-AA¹⁷-LYY, RNVQXRP:TQV:EPLT-AA¹⁷-LYY, KIPKAXX:VPQ:EPLT-AA¹⁷-LYY, GIPEPXX:VPQ:EPLT-AA¹⁷-LYY, SIPKAXX:VPQ:EPLT-AA¹⁷-LYY, HVTKPTX:VPQ:EPLT-AA¹⁷-LYY, YVPKPXX:VPQ:EPLT-AA¹⁷-LYY, TVPKPXX:VPQ:EPLT-AA¹⁷-LYY, AVPKAXX:VPQ:EPLT-AA¹⁷-LYY, KVGKAXX:VPQ:EPLT-AA¹⁷-LYY, KASKAXX:VPQ:EPLT-AA¹⁷-LYY, GSAGPXX:VPQ:EPLT-AA¹⁷-LYY, AAPASXX:VPQ:EPLT-AA¹⁷-LYY, STPPTXX:VPQ:EPLT-AA¹⁷-LYY, HVPKPXX:VPQ:EPLT-AA¹⁷-LYY, RVPSTXX:VPQ:EPLT-AA¹⁷-LYY, ASASPXX:VPQ:EPLT-AA¹⁷-LYY, NDEGLEX:VPT:SNIT-AA¹⁷-QIM, GIPEPXX:VPE:SNIT-AA¹⁷-QIM, HVTKPTX:APT:SNIT-AA¹⁷-QIM, YVPKPXX:APT:SNIT-AA¹⁷-QIM, TVPKPXX:APT:SNIT-AA¹⁷-QIM, AVPKAXX:APT:SNIT-AA¹⁷-QIM, GSAGPXX:TPT:SNIT-AA¹⁷-QIM, AAPASXX:VPA:SNIT-AA¹⁷-QIM, HVPKPXX:APT:SNIT-AA¹⁷-QIM, RVPSTXX:APV:SNIT-AA¹⁷-QIM, ASAAPXX:VPQ:SNIT-AA¹⁷-QIM, ASASPXX:VSQ:SNIT-AA¹⁷-QIM, ASASPXX:VPQ:SNIT-AA¹⁷-QIM, SSVKXQP:SRV:SNIT-AA¹⁷-QIM, RNVQXRP:TQV:SNIT-AA¹⁷-QIM, RNVQXRP:SRV:RSVK-AA¹⁷-AKV, KIPKAXX:VPT:RSVK-AA¹⁷-AKV, GIPEPXX:VPE:RSVK-AA¹⁷-AKV, SIPKAXX:VPT:RSVK-AA¹⁷-AKV, HVTKPTX:APT:RSVK-AA¹⁷-AKV, YVPKPXX:APT:RSVK-AA¹⁷-AKV, TVPKPXX:APT:RSVK-AA¹⁷-AKV, AVPKAXX:APT:RSVK-AA¹⁷-AKV, KVGKAXX:VPT:RSVK-AA¹⁷-AKV, KASKAXX:VPT:RSVK-AA¹⁷-AKV, GSAGPXX:TPT:RSVK-AA¹⁷-AKV, AAPASXX:VPA:RSVK-AA¹⁷-AKV, STPPTXX:VPT:RSVK-AA¹⁷-AKV, HVPKPXX:APT:RSVK-AA¹⁷-AKV, RVPSTXX:APV:RSVK-AA¹⁷-AKV, ASAAPXX:VPQ:RSVK-AA¹⁷-AKV, ASASPXX:VSQ:RSVK-AA¹⁷-AKV, ASASPXX:VPQ:RSVK-AA¹⁷-AKV, NDEGLEX:VPT:RSVK-AA¹⁷-AKV, RNVQXRP:TQV:RSVK-AA¹⁷-AKV, SSVKXQP:TQV:RPVQ-AA¹⁷-RKI, KIPKAXX:VPT:RPVQ-AA¹⁷-RKI, GIPEPXX:VPE:RPVQ-AA¹⁷-RKI, SIPKAXX:VPT:RPVQ-AA¹⁷-RKI, HVTKPTX:APT:RPVQ-AA¹⁷-RKI, YVPKPXX:APT:RPVQ-AA¹⁷-RKI, TVPKPXX:APT:RPVQ-AA¹⁷-RKI, AVPKAXX:APT:RPVQ-AA¹⁷-RKI, KVGKAXX:VPT:RPVQ-AA¹⁷-RKI, KASKAXX:VPT:RPVQ-AA¹⁷-RKI, GSAGPXX:TPT:RPVQ-AA¹⁷-RKI, AAPASXX:VPA:RPVQ-AA¹⁷-RKI, STPPTXX:VPT:RPVQ-AA¹⁷-RKI, HVPKPXX:APT:RPVQ-AA¹⁷-RKI, RVPSTXX:APV:RPVQ-AA¹⁷-RKI, ASAAPXX:VPQ:RPVQ-AA¹⁷-RKI, ASASPXX:VSQ:RPVQ-AA¹⁷-RKI, ASASPXX:VPQ:RPVQ-AA¹⁷-RKI, NDEGLEX:VPT:RPVQ-AA¹⁷-RKI and SSVKXQP:SRV:RPVQ-AA¹⁷-RKI; and wherein AA¹⁷ is selected from the group consisting of G, A, V, L, I, P, F, M, W, T and S (in particular is selected from the group consisting of M, I, L, V and T).

[0413] In certain embodiments, the triplet PEP7:PEP5:PEP1 is selected from the group consisting of GIPEPXX:VPTKM:SAIS, HVTKPTX:VPTKL:SAIS, YVPKPXX:VPTKL:SAIS, TVPKPXX:VPTQL:SAIS, AVPKAXX:VPTKL:SAIS, KVGKAXX:VPTKL:SAIS, KASKAXX:VPTKL:SAIS, GSAGPXX:VPTKM:SAIS, AAPASXX:VPTRL:SAIS, STPPTXX:VPTRL:SAIS, HVPKPXX:VPTKL:SAIS, RVPSTXX:VPTKT:SAIS, ASAAPXX:VPTAL:SAIS, ASASPXX:VPTDL:SAIS, GIPEPXX:VPEKM:SAIS, HVTKPTX:APTKL:SAIS, YVPKPXX:APTKL:SAIS, TVPKPXX:APTQL:SAIS, AVPKAXX:APTKL:SAIS, GSAGPXX:TPTKM:SAIS, AAPASXX:VPARL:SAIS, HVPKPXX:APTKL:SAIS, RVPSTXX:APVKT:SAIS, ASAAPXX:VPQAL:SAIS, ASASPXX:VSQDL:SAIS, ASASPXX:VPQDL:SAIS, SSVKXQP:SRVHH:SAIS, RNVQXRP:TQVQL:SAIS, KIPKAXX:VPEEL:SSLS, SIPKAXX:VPEEL:SSLS, HVTKPTX:VPEKL:SSLS, YVPKPXX:VPEKL:SSLS, TVPKPXX:VPEQL:SSLS, AVPKAXX:VPEKL:SSLS, KVGKAXX:VPEKL:SSLS, KASKAXX:VPEKL:SSLS, GSAGPXX:VPEKM:SSLS, AAPASXX:VPERL:SSLS, STPPTXX:VPERL:SSLS, HVPKPXX:VPEKL:SSLS, RVPSTXX:VPEKT:SSLS, ASAAPXX:VPEAL:SSLS, ASASPXX:VPEDL:SSLS, KIPKAXX:VPTEL:SSLS, SIPKAXX:VPTEL:SSLS, HVTKPTX:APTKL:SSLS, YVPKPXX:APTKL:SSLS, TVPKPXX:APTQL:SSLS, AVPKAXX:APTKL:SSLS, KVGKAXX:VPTKL:SSLS, KASKAXX:VPTKL:SSLS, GSAGPXX:TPTKM:SSLS, AAPASXX:VPARL:SSLS, STPPTXX:VPTRL:SSLS, HVPKPXX:APTKL:SSLS, RVPSTXX:APVKT:SSLS, ASAAPXX:VPQAL:SSLS, ASASPXX:VSQDL:SSLS, ASASPXX:VPQDL:SSLS, NDEGLEX:VPTEE:SSLS, NDEGLEX:VPTGQ:SSLS, SSVKXQP:SRVHH:SSLS, RNVQXRP:TQVQL:SSLS, KIPKAXX:APTEL:NAIS, GIPEPXX:APTKM:NAIS, SIPKAXX:APTEL:NAIS, AVPKAXX:APTKL:NAIS, KVGKAXX:APTKL:NAIS, KASKAXX:APTKL:NAIS, GSAGPXX:APTKM:NAIS, AAPASXX:APTRL:NAIS, STPPTXX:APTRL:NAIS, RVPSTXX:APTKT:NAIS, ASAAPXX:APTAL:NAIS, ASASPXX:APTDL:NAIS, KIPKAXX:VPTEL:NAIS, GIPEPXX:VPEKM:NAIS, SIPKAXX:VPTEL:NAIS, KVGKAXX:VPTKL:NAIS, KASKAXX:VPTKL:NAIS, GSAGPXX:TPTKM:NAIS, AAPASXX:VPARL:NAIS, STPPTXX:VPTRL:NAIS, RVPSTXX:APVKT:NAIS, ASAAPXX:VPQAL:NAIS, ASASPXX:VSQDL:NAIS, ASASPXX:VPQDL:NAIS, NDEGLEX:VPTEE:NAIS, NDEGLEX:VPTGQ:NAIS, SSVKXQP:SRVHH:NAIS, RNVQXRP:TQVQL:NAIS, KIPKAXX:APTEL:SATS, GIPEPXX:APTKM:SATS, SIPKAXX:APTEL:SATS, HVTKPTX:APTKL:SATS, YVPKPXX:APTKL:SATS, TVPKPXX:APTQL:SATS, KVGKAXX:APTKL:SATS, KASKAXX:APTKL:SATS, GSAGPXX:APTKM:SATS, AAPASXX:APTRL:SATS, STPPTXX:APTRL:SATS, HVPKPXX:APTKL:SATS, RVPSTXX:APTKT:SATS, ASAAPXX:APTAL:SATS, ASASPXX:APTDL:SATS, KIPKAXX:VPTEL:SATS, GIPEPXX:VPEKM:SATS, SIPKAXX:VPTEL:SATS, KVGKAXX:VPTKL:SATS, KASKAXX:VPTKL:SATS, GSAGPXX:TPTKM:SATS, AAPASXX:VPARL:SATS, STPPTXX:VPTRL:SATS, RVPSTXX:APVKT:SATS, ASAAPXX:VPQAL:SATS, ASASPXX:VSQDL:SATS, ASASPXX:VPQDL:SATS, NDEGLEX:VPTEE:SATS, NDEGLEX:VPTGQ:SATS, SSVKXQP:SRVHH:SATS, RNVQXRP:TQVQL:SATS, KIPKAXX:VPTEL:SPIS, GIPEPXX:VPTKM:SPIS, SIPKAXX:VPTEL:SPIS, HVTKPTX:VPTKL:SPIS, YVPKPXX:VPTKL:SPIS, TVPKPXX:VPTQL:SPIS, AVPKAXX:VPTKL:SPIS, KASKAXX:VPTKL:SPIS, GSAGPXX:VPTKM:SPIS, AAPASXX:VPTRL:SPIS, STPPTXX:VPTRL:SPIS, HVPKPXX:VPTKL:SPIS, RVPSTXX:VPTKT:SPIS, ASAAPXX:VPTAL:SPIS, ASASPXX:VPTDL:SPIS, GIPEPXX:VPEKM:SPIS, HVTKPTX:APTKL:SPIS, YVPKPXX:APTKL:SPIS, TVPKPXX:APTQL:SPIS, AVPKAXX:APTKL:SPIS, GSAGPXX:TPTKM:SPIS, AAPASXX:VPARL:SPIS, HVPKPXX:APTKL:SPIS, RVPSTXX:APVKT:SPIS, ASAAPXX:VPQAL:SPIS, ASASPXX:VSQDL:SPIS, ASASPXX:VPQDL:SPIS, SSVKXQP:SRVHH:SPIS, RNVQXRP:TQVQL:SPIS, KIPKAXX:VPTEL:EPIS, GIPEPXX:VPTKM:EPIS, SIPKAXX:VPTEL:EPIS, HVTKPTX:VPTKL:EPIS, YVPKPXX:VPTKL:EPIS, TVPKPXX:VPTQL:EPIS, AVPKAXX:VPTKL:EPIS, KVGKAXX:VPTKL:EPIS, GSAGPXX:VPTKM:EPIS, AAPASXX:VPTRL:EPIS, STPPTXX:VPTRL:EPIS, HVPKPXX:VPTKL:EPIS, RVPSTXX:VPTKT:EPIS, ASAAPXX:VPTAL:EPIS, ASASPXX:VPTDL:EPIS, GIPEPXX:VPEKM:EPIS, HVTKPTX:APTKL:EPIS, YVPKPXX:APTKL:EPIS, TVPKPXX:APTQL:EPIS, AVPKAXX:APTKL:EPIS, GSAGPXX:TPTKM:EPIS, AAPASXX:VPARL:EPIS, HVPKPXX:APTKL:EPIS, RVPSTXX:APVKT:EPIS, ASAAPXX:VPQAL:EPIS, ASASPXX:VSQDL:EPIS, ASASPXX:VPQDL:EPIS, SSVKXQP:SRVHH:EPIS, RNVQXRP:TQVQL:EPIS, KIPKAXX:TPTEL:SPIN, GIPEPXX:TPTKM:SPIN, SIPKAXX:TPTEL:SPIN, HVTKPTX:TPTKL:SPIN, YVPKPXX:TPTKL:SPIN, TVPKPXX:TPTQL:SPIN, AVPKAXX:TPTKL:SPIN, KVGKAXX:TPTKL:SPIN, KASKAXX:TPTKL:SPIN, AAPASXX:TPTRL:SPIN, STPPTXX:TPTRL:SPIN, HVPKPXX:TPTKL:SPIN, RVPSTXX:TPTKT:SPIN, ASAAPXX:TPTAL:SPIN, ASASPXX:TPTDL:SPIN, KIPKAXX:VPTEL:SPIN, GIPEPXX:VPEKM:SPIN, SIPKAXX:VPTEL:SPIN, HVTKPTX:APTKL:SPIN, YVPKPXX:APTKL:SPIN, TVPKPXX:APTQL:SPIN, AVPKAXX:APTKL:SPIN, KVGKAXX:VPTKL:SPIN, KASKAXX:VPTKL:SPIN, AAPASXX:VPARL:SPIN, STPPTXX:VPTRL:SPIN, HVPKPXX:APTKL:SPIN, RVPSTXX:APVKT:SPIN, ASAAPXX:VPQAL:SPIN, ASASPXX:VSQDL:SPIN, ASASPXX:VPQDL:SPIN, NDEGLEX:VPTEE:SPIN, NDEGLEX:VPTGQ:SPIN, SSVKXQP:SRVHH:SPIN, RNVQXRP:TQVQL:SPIN, KIPKAXX:VPAEL:SPIS, GIPEPXX:VPAKM:SPIS, SIPKAXX:VPAEL:SPIS, HVTKPTX:VPAKL:SPIS, YVPKPXX:VPAKL:SPIS, TVPKPXX:VPAQL:SPIS, AVPKAXX:VPAKL:SPIS, KVGKAXX:VPAKL:SPIS, KASKAXX:VPAKL:SPIS, GSAGPXX:VPAKM:SPIS, STPPTXX:VPARL:SPIS, HVPKPXX:VPAKL:SPIS, RVPSTXX:VPAKT:SPIS, ASAAPXX:VPAAL:SPIS, ASASPXX:VPADL:SPIS, KVGKAXX:VPTKL:SPIS, NDEGLEX:VPTEE:SPIS, NDEGLEX:VPTGQ:SPIS, KIPKAXX:APVEL:KPLS, GIPEPXX:APVKM:KPLS, SIPKAXX:APVEL:KPLS, HVTKPTX:APVKL:KPLS, YVPKPXX:APVKL:KPLS, TVPKPXX:APVQL:KPLS, AVPKAXX:APVKL:KPLS, KVGKAXX:APVKL:KPLS, KASKAXX:APVKL:KPLS, GSAGPXX:APVKM:KPLS, AAPASXX:APVRL:KPLS, STPPTXX:APVRL:KPLS, HVPKPXX:APVKL:KPLS, ASAAPXX:APVAL:KPLS, ASASPXX:APVDL:KPLS, KIPKAXX:VPTEL:KPLS, GIPEPXX:VPEKM:KPLS, SIPKAXX:VPTEL:KPLS, HVTKPTX:APTKL:KPLS, YVPKPXX:APTKL:KPLS, TVPKPXX:APTQL:KPLS, AVPKAXX:APTKL:KPLS, KVGKAXX:VPTKL:KPLS, KASKAXX:VPTKL:KPLS, GSAGPXX:TPTKM:KPLS, AAPASXX:VPARL:KPLS, STPPTXX:VPTRL:KPLS, HVPKPXX:APTKL:KPLS, ASAAPXX:VPQAL:KPLS, ASASPXX:VSQDL:KPLS, ASASPXX:VPQDL:KPLS, NDEGLEX:VPTEE:KPLS, NDEGLEX:VPTGQ:KPLS, SSVKXQP:SRVHH:KPLS, RNVQXRP:TQVQL:KPLS, KIPKAXX:VPQEL:EPLP, GIPEPXX:VPQKM:EPLP, SIPKAXX:VPQEL:EPLP, HVTKPTX:VPQKL:EPLP, YVPKPXX:VPQKL:EPLP, TVPKPXX:VPQQL:EPLP, AVPKAXX:VPQKL:EPLP, KVGKAXX:VPQKL:EPLP, KASKAXX:VPQKL:EPLP, GSAGPXX:VPQKM:EPLP, AAPASXX:VPQRL:EPLP, STPPTXX:VPQRL:EPLP, HVPKPXX:VPQKL:EPLP, RVPSTXX:VPQKT:EPLP, ASASPXX:VPQDL:EPLP, KIPKAXX:VPTEL:EPLP, GIPEPXX:VPEKM:EPLP, SIPKAXX:VPTEL:EPLP, HVTKPTX:APTKL:EPLP, YVPKPXX:APTKL:EPLP, TVPKPXX:APTQL:EPLP, AVPKAXX:APTKL:EPLP, KVGKAXX:VPTKL:EPLP, KASKAXX:VPTKL:EPLP, GSAGPXX:TPTKM:EPLP, AAPASXX:VPARL:EPLP, STPPTXX:VPTRL:EPLP, HVPKPXX:APTKL:EPLP, RVPSTXX:APVKT:EPLP, ASASPXX:VSQDL:EPLP, NDEGLEX:VPTEE:EPLP, NDEGLEX:VPTGQ:EPLP, SSVKXQP:SRVHH:EPLP, RNVQXRP:TQVQL:EPLP, KIPKAXX:VSQEL:EPLT, GIPEPXX:VSQKM:EPLT, SIPKAXX:VSQEL:EPLT, HVTKPTX:VSQKL:EPLT, YVPKPXX:VSQKL:EPLT, TVPKPXX:VSQQL:EPLT, AVPKAXX:VSQKL:EPLT, KVGKAXX:VSQKL:EPLT, KASKAXX:VSQKL:EPLT, GSAGPXX:VSQKM:EPLT, AAPASXX:VSQRL:EPLT, STPPTXX:VSQRL:EPLT, HVPKPXX:VSQKL:EPLT, RVPSTXX:VSQKT:EPLT, ASAAPXX:VSQAL:EPLT, ASASPXX:VSQDL:EPLT, KIPKAXX:VPTEL:EPLT, GIPEPXX:VPEKM:EPLT, SIPKAXX:VPTEL:EPLT, HVTKPTX:APTKL:EPLT, YVPKPXX:APTKL:EPLT, TVPKPXX:APTQL:EPLT, AVPKAXX:APTKL:EPLT, KVGKAXX:VPTKL:EPLT, KASKAXX:VPTKL:EPLT, GSAGPXX:TPTKM:EPLT, AAPASXX:VPARL:EPLT, STPPTXX:VPTRL:EPLT, HVPKPXX:APTKL:EPLT, RVPSTXX:APVKT:EPLT, ASAAPXX:VPQAL:EPLT, NDEGLEX:VPTEE:EPLT, NDEGLEX:VPTGQ:EPLT, SSVKXQP:SRVHH:EPLT, RNVQXRP:TQVQL:EPLT, KIPKAXX:VPQEL:EPLT, GIPEPXX:VPQKM:EPLT, SIPKAXX:VPQEL:EPLT, HVTKPTX:VPQKL:EPLT, YVPKPXX:VPQKL:EPLT, TVPKPXX:VPQQL:EPLT, AVPKAXX:VPQKL:EPLT, KVGKAXX:VPQKL:EPLT, KASKAXX:VPQKL:EPLT, GSAGPXX:VPQKM:EPLT, AAPASXX:VPQRL:EPLT, STPPTXX:VPQRL:EPLT, HVPKPXX:VPQKL:EPLT, RVPSTXX:VPQKT:EPLT, ASASPXX:VPQDL:EPLT, NDEGLEX:VPTGQ:SNIT, GIPEPXX:VPEKM:SNIT, HVTKPTX:APTKL:SNIT, YVPKPXX:APTKL:SNIT, TVPKPXX:APTQL:SNIT, AVPKAXX:APTKL:SNIT, GSAGPXX:TPTKM:SNIT, AAPASXX:VPARL:SNIT, HVPKPXX:APTKL:SNIT, RVPSTXX:APVKT:SNIT, ASAAPXX:VPQAL:SNIT, ASASPXX:VSQDL:SNIT, ASASPXX:VPQDL:SNIT, SSVKXQP:SRVHH:SNIT, RNVQXRP:TQVQL:SNIT, RNVQXRP:SRVQL:RSVK, KIPKAXX:VPTEL:RSVK, GIPEPXX:VPEKM:RSVK, SIPKAXX:VPTEL:RSVK, HVTKPTX:APTKL:RSVK, YVPKPXX:APTKL:RSVK, TVPKPXX:APTQL:RSVK, AVPKAXX:APTKL:RSVK, KVGKAXX:VPTKL:RSVK, KASKAXX:VPTKL:RSVK, GSAGPXX:TPTKM:RSVK, AAPASXX:VPARL:RSVK, STPPTXX:VPTRL:RSVK, HVPKPXX:APTKL:RSVK, RVPSTXX:APVKT:RSVK, ASAAPXX:VPQAL:RSVK, ASASPXX:VSQDL:RSVK, ASASPXX:VPQDL:RSVK, NDEGLEX:VPTEE:RSVK, NDEGLEX:VPTGQ:RSVK, RNVQXRP:TQVQL:RSVK, SSVKXQP:TQVHH:RPVQ, KIPKAXX:VPTEL:RPVQ, GIPEPXX:VPEKM:RPVQ, SIPKAXX:VPTEL:RPVQ, HVTKPTX:APTKL:RPVQ, YVPKPXX:APTKL:RPVQ, TVPKPXX:APTQL:RPVQ, AVPKAXX:APTKL:RPVQ, KVGKAXX:VPTKL:RPVQ, KASKAXX:VPTKL:RPVQ, GSAGPXX:TPTKM:RPVQ, AAPASXX:VPARL:RPVQ, STPPTXX:VPTRL:RPVQ, HVPKPXX:APTKL:RPVQ, RVPSTXX:APVKT:RPVQ, ASAAPXX:VPQAL:RPVQ, ASASPXX:VSQDL:RPVQ, ASASPXX:VPQDL:RPVQ, NDEGLEX:VPTEE:RPVQ, NDEGLEX:VPTGQ:RPVQ and SSVKXQP:SRVHH:RPVQ.

[0414] In certain embodiments, the triplet PEP7:PEP5:PEP12 is selected from the group consisting of GIPEPXX:VPTKM:SAIS-AA¹⁷-LYL, HVTKPTX:VPTKL:SAIS-AA¹⁷-LYL, YVPKPXX:VPTKL:SAIS-AA¹⁷-LYL, TVPKPXX:VPTQL:SAIS-AA¹⁷-LYL, AVPKAXX:VPTKL:SAIS-AA¹⁷-LYL, KVGKAXX:VPTKL:SAIS-AA¹⁷-LYL, KASKAXX:VPTKL:SAIS-AA¹⁷-LYL, GSAGPXX:VPTKM:SAIS-AA¹⁷-LYL, AAPASXX:VPTRL:SAIS-AA¹⁷-LYL, STPPTXX:VPTRL:SAIS-AA¹⁷-LYL, HVPKPXX:VPTKL:SAIS-AA¹⁷-LYL, RVPSTXX:VPTKT:SAIS-AA¹⁷-LYL, ASAAPXX:VPTAL:SAIS-AA¹⁷-LYL, ASASPXX:VPTDL:SAIS-AA¹⁷-LYL, GIPEPXX:VPEKM:SAIS-AA¹⁷-LYL, HVTKPTX:APTKL:SAIS-AA¹⁷-LYL, YVPKPXX:APTKL:SAIS-AA¹⁷-LYL, TVPKPXX:APTQL:SAIS-AA¹⁷-LYL, AVPKAXX:APTKL:SAIS-AA¹⁷-LYL, GSAGPXX:TPTKM:SAIS-AA¹⁷-LYL, AAPASXX:VPARL:SAIS-AA¹⁷-LYL, HVPKPXX:APTKL:SAIS-AA¹⁷-LYL, RVPSTXX:APVKT:SAIS-AA¹⁷-LYL, ASAAPXX:VPQAL:SAIS-AA¹⁷-LYL, ASASPXX:VSQDL:SAIS-AA¹⁷-LYL, ASASPXX:VPQDL:SAIS-AA¹⁷-LYL, SSVKXQP:SRVHH:SAIS-AA¹⁷-LYL, RNVQXRP:TQVQL:SAIS-AA¹⁷-LYL, KIPKAXX:VPEEL:SSLS-AA¹⁷-LFF, SIPKAXX:VPEEL:SSLS-AA¹⁷-LFF, HVTKPTX:VPEKL:SSLS-AA¹⁷-LFF, YVPKPXX:VPEKL:SSLS-AA¹⁷-LFF, TVPKPXX:VPEQL:SSLS-AA¹⁷-LFF, AVPKAXX:VPEKL:SSLS-AA¹⁷-LFF, KVGKAXX:VPEKL:SSLS-AA¹⁷-LFF, KASKAXX:VPEKL:SSLS-AA¹⁷-LFF, GSAGPXX:VPEKM:SSLS-AA¹⁷-LFF, AAPASXX:VPERL:SSLS-AA¹⁷-LFF, STPPTXX:VPERL:SSLS-AA¹⁷-LFF, HVPKPXX:VPEKL:SSLS-AA¹⁷-LFF, RVPSTXX:VPEKT:SSLS-AA¹⁷-LFF, ASAAPXX:VPEAL:SSLS-AA¹⁷-LFF, ASASPXX:VPEDL:SSLS-AA¹⁷-LFF, KIPKAXX:VPTEL:SSLS-AA¹⁷-LFF, SIPKAXX:VPTEL:SSLS-AA¹⁷-LFF, HVTKPTX:APTKL:SSLS-AA¹⁷-LFF, YVPKPXX:APTKL:SSLS-AA¹⁷-LFF, TVPKPXX:APTQL:SSLS-AA¹⁷-LFF, AVPKAXX:APTKL:SSLS-AA¹⁷-LFF, KVGKAXX:VPTKL:SSLS-AA¹⁷-LFF, KASKAXX:VPTKL:SSLS-AA¹⁷-LFF, GSAGPXX:TPTKM:SSLS-AA¹⁷-LFF, AAPASXX:VPARL:SSLS-AA¹⁷-LFF, STPPTXX:VPTRL:SSLS-AA¹⁷-LFF, HVPKPXX:APTKL:SSLS-AA¹⁷-LFF, RVPSTXX:APVKT:SSLS-AA¹⁷-LFF, ASAAPXX:VPQAL:SSLS-AA¹⁷-LFF, ASASPXX:VSQDL:SSLS-AA¹⁷-LFF, ASASPXX:VPQDL:SSLS-AA¹⁷-LFF, NDEGLEX:VPTEE:SSLS-AA¹⁷-LFF, NDEGLEX:VPTGQ:SSLS-AA¹⁷-LFF, SSVKXQP:SRVHH:SSLS-AA¹⁷-LFF, RNVQXRP:TQVQL:SSLS-AA¹⁷-LFF, KIPKAXX:APTEL:NAIS-AA¹⁷-LYF, GIPEPXX:APTKM:NAIS-AA¹⁷-LYF, SIPKAXX:APTEL:NAIS-AA¹⁷-LYF, AVPKAXX:APTKL:NAIS-AA¹⁷-LYF, KVGKAXX:APTKL:NAIS-AA¹⁷-LYF, KASKAXX:APTKL:NAIS-AA¹⁷-LYF, GSAGPXX:APTKM:NAIS-AA¹⁷-LYF, AAPASXX:APTRL:NAIS-AA¹⁷-LYF, STPPTXX:APTRL:NAIS-AA¹⁷-LYF, RVPSTXX:APTKT:NAIS-AA¹⁷-LYF, ASAAPXX:APTAL:NAIS-AA¹⁷-LYF, ASASPXX:APTDL:NAIS-AA¹⁷-LYF, KIPKAXX:VPTEL:NAIS-AA¹⁷-LYF, GIPEPXX:VPEKM:NAIS-AA¹⁷-LYF, SIPKAXX:VPTEL:NAIS-AA¹⁷-LYF, KVGKAXX:VPTKL:NAIS-AA¹⁷-LYF, KASKAXX:VPTKL:NAIS-AA¹⁷-LYF, GSAGPXX:TPTKM:NAIS-AA¹⁷-LYF, AAPASXX:VPARL:NAIS-AA¹⁷-LYF, STPPTXX:VPTRL:NAIS-AA¹⁷-LYF, RVPSTXX:APVKT:NAIS-AA¹⁷-LYF, ASAAPXX:VPQAL:NAIS-AA¹⁷-LYF, ASASPXX:VSQDL:NAIS-AA¹⁷-LYF, ASASPXX:VPQDL:NAIS-AA¹⁷-LYF, NDEGLEX:VPTEE:NAIS-AA¹⁷-LYF, NDEGLEX:VPTGQ:NAIS-AA¹⁷-LYF, SSVKXQP:SRVHH:NAIS-AA¹⁷-LYF, RNVQXRP:TQVQL:NAIS-AA¹⁷-LYF, KIPKAXX:APTEL:SATS-AA¹⁷-LYY, GIPEPXX:APTKM:SATS-AA¹⁷-LYY, SIPKAXX:APTEL:SATS-AA¹⁷-LYY, HVTKPTX:APTKL:SATS-AA¹⁷-LYY, YVPKPXX:APTKL:SATS-AA¹⁷-LYY, TVPKPXX:APTQL:SATS-AA¹⁷-LYY, KVGKAXX:APTKL:SATS-AA¹⁷-LYY, KASKAXX:APTKL:SATS-AA¹⁷-LYY, GSAGPXX:APTKM:SATS-AA¹⁷-LYY, AAPASXX:APTRL:SATS-AA¹⁷-LYY, STPPTXX:APTRL:SATS-AA¹⁷-LYY, HVPKPXX:APTKL:SATS-AA¹⁷-LYY, RVPSTXX:APTKT:SATS-AA¹⁷-LYY, ASAAPXX:APTAL:SATS-AA¹⁷-LYY, ASASPXX:APTDL:SATS-AA¹⁷-LYY, KIPKAXX:VPTEL:SATS-AA¹⁷-LYY, GIPEPXX:VPEKM:SATS-AA¹⁷-LYY, SIPKAXX:VPTEL:SATS-AA¹⁷-LYY, KVGKAXX:VPTKL:SATS-AA¹⁷-LYY, KASKAXX:VPTKL:SATS-AA¹⁷-LYY, GSAGPXX:TPTKM:SATS-AA¹⁷-LYY, AAPASXX:VPARL:SATS-AA¹⁷-LYY, STPPTXX:VPTRL:SATS-AA¹⁷-LYY, RVPSTXX:APVKT:SATS-AA¹⁷-LYY, ASAAPXX:VPQAL:SATS-AA¹⁷-LYY, ASASPXX:VSQDL:SATS-AA¹⁷-LYY, ASASPXX:VPQDL:SATS-AA¹⁷-LYY, NDEGLEX:VPTEE:SATS-AA¹⁷-LYY, NDEGLEX:VPTGQ:SATS-AA¹⁷-LYY, SSVKXQP:SRVHH:SATS-AA¹⁷-LYY, RNVQXRP:TQVQL:SATS-AA¹⁷-LYY, KIPKAXX:VPTEL:SPIS-AA¹⁷-LYK, GIPEPXX:VPTKM:SPIS-AA¹⁷-LYK, SIPKAXX:VPTEL:SPIS-AA¹⁷-LYK, HVTKPTX:VPTKL:SPIS-AA¹⁷-LYK, YVPKPXX:VPTKL:SPIS-AA¹⁷-LYK, TVPKPXX:VPTQL:SPIS-AA¹⁷-LYK, AVPKAXX:VPTKL:SPIS-AA¹⁷-LYK, KASKAXX:VPTKL:SPIS-AA¹⁷-LYK, GSAGPXX:VPTKM:SPIS-AA¹⁷-LYK, AAPASXX:VPTRL:SPIS-AA¹⁷-LYK, STPPTXX:VPTRL:SPIS-AA¹⁷-LYK, HVPKPXX:VPTKL:SPIS-AA¹⁷-LYK, RVPSTXX:VPTKT:SPIS-AA¹⁷-LYK, ASAAPXX:VPTAL:SPIS-AA¹⁷-LYK, ASASPXX:VPTDL:SPIS-AA¹⁷-LYK, GIPEPXX:VPEKM:SPIS-AA¹⁷-LYK, HVTKPTX:APTKL:SPIS-AA¹⁷-LYK, YVPKPXX:APTKL:SPIS-AA¹⁷-LYK, TVPKPXX:APTQL:SPIS-AA¹⁷-LYK, AVPKAXX:APTKL:SPIS-AA¹⁷-LYK, GSAGPXX:TPTKM:SPIS-AA¹⁷-LYK, AAPASXX:VPARL:SPIS-AA¹⁷-LYK, HVPKPXX:APTKL:SPIS-AA¹⁷-LYK, RVPSTXX:APVKT:SPIS-AA¹⁷-LYK, ASAAPXX:VPQAL:SPIS-AA¹⁷-LYK, ASASPXX:VSQDL:SPIS-AA¹⁷-LYK, ASASPXX:VPQDL:SPIS-AA¹⁷-LYK, SSVKXQP:SRVHH:SPIS-AA¹⁷-LYK, RNVQXRP:TQVQL:SPIS-AA¹⁷-LYK, KIPKAXX:VPTEL:EPIS-AA¹⁷-LYL, GIPEPXX:VPTKM:EPIS-AA¹⁷-LYL, SIPKAXX:VPTEL:EPIS-AA¹⁷-LYL, HVTKPTX:VPTKL:EPIS-AA¹⁷-LYL, YVPKPXX:VPTKL:EPIS-AA¹⁷-LYL, TVPKPXX:VPTQL:EPIS-AA¹⁷-LYL, AVPKAXX:VPTKL:EPIS-AA¹⁷-LYL, KVGKAXX:VPTKL:EPIS-AA¹⁷-LYL, GSAGPXX:VPTKM:EPIS-AA¹⁷-LYL, AAPASXX:VPTRL:EPIS-AA¹⁷-LYL, STPPTXX:VPTRL:EPIS-AA¹⁷-LYL, HVPKPXX:VPTKL:EPIS-AA¹⁷-LYL, RVPSTXX:VPTKT:EPIS-AA¹⁷-LYL, ASAAPXX:VPTAL:EPIS-AA¹⁷-LYL, ASASPXX:VPTDL:EPIS-AA¹⁷-LYL, GIPEPXX:VPEKM:EPIS-AA¹⁷-LYL, HVTKPTX:APTKL:EPIS-AA¹⁷-LYL, YVPKPXX:APTKL:EPIS-AA¹⁷-LYL, TVPKPXX:APTQL:EPIS-AA¹⁷-LYL, AVPKAXX:APTKL:EPIS-AA¹⁷-LYL, GSAGPXX:TPTKM:EPIS-AA¹⁷-LYL, AAPASXX:VPARL:EPIS-AA¹⁷-LYL, HVPKPXX:APTKL:EPIS-AA¹⁷-LYL, RVPSTXX:APVKT:EPIS-AA¹⁷-LYL, ASAAPXX:VPQAL:EPIS-AA¹⁷-LYL, ASASPXX:VSQDL:EPIS-AA¹⁷-LYL, ASASPXX:VPQDL:EPIS-AA¹⁷-LYL, SSVKXQP:SRVHH:EPIS-AA¹⁷-LYL, RNVQXRP:TQVQL:EPIS-AA¹⁷-LYL, KIPKAXX:TPTEL:SPIN-AA¹⁷-LYF, GIPEPXX:TPTKM:SPIN-AA¹⁷-LYF, SIPKAXX:TPTEL:SPIN-AA¹⁷-LYF, HVTKPTX:TPTKL:SPIN-AA¹⁷-LYF, YVPKPXX:TPTKL:SPIN-AA¹⁷-LYF, TVPKPXX:TPTQL:SPIN-AA¹⁷-LYF, AVPKAXX:TPTKL:SPIN-AA¹⁷-LYF, KVGKAXX:TPTKL:SPIN-AA¹⁷-LYF, KASKAXX:TPTKL:SPIN-AA¹⁷-LYF, AAPASXX:TPTRL:SPIN-AA¹⁷-LYF, STPPTXX:TPTRL:SPIN-AA¹⁷-LYF, HVPKPXX:TPTKL:SPIN-AA¹⁷-LYF, RVPSTXX:TPTKT:SPIN-AA¹⁷-LYF, ASAAPXX:TPTAL:SPIN-AA¹⁷-LYF, ASASPXX:TPTDL:SPIN-AA¹⁷-LYF, KIPKAXX:VPTEL:SPIN-AA¹⁷-LYF, GIPEPXX:VPEKM:SPIN-AA¹⁷-LYF, SIPKAXX:VPTEL:SPIN-AA¹⁷-LYF, HVTKPTX:APTKL:SPIN-AA¹⁷-LYF, YVPKPXX:APTKL:SPIN-AA¹⁷-LYF, TVPKPXX:APTQL:SPIN-AA¹⁷-LYF, AVPKAXX:APTKL:SPIN-AA¹⁷-LYF, KVGKAXX:VPTKL:SPIN-AA¹⁷-LYF, KASKAXX:VPTKL:SPIN-AA¹⁷-LYF, AAPASXX:VPARL:SPIN-AA¹⁷-LYF, STPPTXX:VPTRL:SPIN-AA¹⁷-LYF, HVPKPXX:APTKL:SPIN-AA¹⁷-LYF, RVPSTXX:APVKT:SPIN-AA¹⁷-LYF, ASAAPXX:VPQAL:SPIN-AA¹⁷-LYF, ASASPXX:VSQDL:SPIN-AA¹⁷-LYF, ASASPXX:VPQDL:SPIN-AA¹⁷-LYF, NDEGLEX:VPTEE:SPIN-AA¹⁷-LYF, NDEGLEX:VPTGQ:SPIN-AA¹⁷-LYF, SSVKXQP:SRVHH:SPIN-AA¹⁷-LYF, RNVQXRP:TQVQL:SPIN-AA¹⁷-LYF, KIPKAXX:VPAEL:SPIS-AA¹⁷-LYI, GIPEPXX:VPAKM:SPIS-AA¹⁷-LYI, SIPKAXX:VPAEL:SPIS-AA¹⁷-LYI, HVTKPTX:VPAKL:SPIS-AA¹⁷-LYI, YVPKPXX:VPAKL:SPIS-AA¹⁷-LYI, TVPKPXX:VPAQL:SPIS-AA¹⁷-LYI, AVPKAXX:VPAKL:SPIS-AA¹⁷-LYI, KVGKAXX:VPAKL:SPIS-AA¹⁷-LYI, KASKAXX:VPAKL:SPIS-AA¹⁷-LYI, GSAGPXX:VPAKM:SPIS-AA¹⁷-LYI, STPPTXX:VPARL:SPIS-AA¹⁷-LYI, HVPKPXX:VPAKL:SPIS-AA¹⁷-LYI, RVPSTXX:VPAKT:SPIS-AA¹⁷-LYI, ASAAPXX:VPAAL:SPIS-AA¹⁷-LYI, ASASPXX:VPADL:SPIS-AA¹⁷-LYI, KIPKAXX:VPTEL:SPIS-AA¹⁷-LYI, GIPEPXX:VPEKM:SPIS-AA¹⁷-LYI, SIPKAXX:VPTEL:SPIS-AA¹⁷-LYI, HVTKPTX:APTKL:SPIS-AA¹⁷-LYI, YVPKPXX:APTKL:SPIS-AA¹⁷-LYI, TVPKPXX:APTQL:SPIS-AA¹⁷-LYI, AVPKAXX:APTKL:SPIS-AA¹⁷-LYI, KVGKAXX:VPTKL:SPIS-AA¹⁷-LYI, KASKAXX:VPTKL:SPIS-AA¹⁷-LYI, GSAGPXX:TPTKM:SPIS-AA¹⁷-LYI, STPPTXX:VPTRL:SPIS-AA¹⁷-LYI, HVPKPXX:APTKL:SPIS-AA¹⁷-LYI, RVPSTXX:APVKT:SPIS-AA¹⁷-LYI, ASAAPXX:VPQAL:SPIS-AA¹⁷-LYI, ASASPXX:VSQDL:SPIS-AA¹⁷-LYI, ASASPXX:VPQDL:SPIS-AA¹⁷-LYI, NDEGLEX:VPTEE:SPIS-AA¹⁷-LYI, NDEGLEX:VPTGQ:SPIS-AA¹⁷-LYI, SSVKXQP:SRVHH:SPIS-AA¹⁷-LYI, RNVQXRP:TQVQL:SPIS-AA¹⁷-LYI, KIPKAXX:VPTEL:SPIS-AA¹⁷-LFI, GIPEPXX:VPTKM:SPIS-AA¹⁷-LFI, SIPKAXX:VPTEL:SPIS-AA¹⁷-LFI, HVTKPTX:VPTKL:SPIS-AA¹⁷-LFI, YVPKPXX:VPTKL:SPIS-AA¹⁷-LFI, TVPKPXX:VPTQL:SPIS-AA¹⁷-LFI, AVPKAXX:VPTKL:SPIS-AA¹⁷-LFI, KVGKAXX:VPTKL:SPIS-AA¹⁷-LFI, KASKAXX:VPTKL:SPIS-AA¹⁷-LFI, GSAGPXX:VPTKM:SPIS-AA¹⁷-LFI, AAPASXX:VPTRL:SPIS-AA¹⁷-LFI, HVPKPXX:VPTKL:SPIS-AA¹⁷-LFI, RVPSTXX:VPTKT:SPIS-AA¹⁷-LFI, ASAAPXX:VPTAL:SPIS-AA¹⁷-LFI, ASASPXX:VPTDL:SPIS-AA¹⁷-LFI, GIPEPXX:VPEKM:SPIS-AA¹⁷-LFI, HVTKPTX:APTKL:SPIS-AA¹⁷-LFI, YVPKPXX:APTKL:SPIS-AA¹⁷-LFI, TVPKPXX:APTQL:SPIS-AA¹⁷-LFI, AVPKAXX:APTKL:SPIS-AA¹⁷-LFI, GSAGPXX:TPTKM:SPIS-AA¹⁷-LFI, AAPASXX:VPARL:SPIS-AA¹⁷-LFI, HVPKPXX:APTKL:SPIS-AA¹⁷-LFI, RVPSTXX:APVKT:SPIS-AA¹⁷-LFI, ASAAPXX:VPQAL:SPIS-AA¹⁷-LFI, ASASPXX:VSQDL:SPIS-AA¹⁷-LFI, ASASPXX:VPQDL:SPIS-AA¹⁷-LFI, SSVKXQP:SRVHH:SPIS-AA¹⁷-LFI, RNVQXRP:TQVQL:SPIS-AA¹⁷-LFI, KIPKAXX:APVEL:KPLS-AA¹⁷-LYV, GIPEPXX:APVKM:KPLS-AA¹⁷-LYV, SIPKAXX:APVEL:KPLS-AA¹⁷-LYV, HVTKPTX:APVKL:KPLS-AA¹⁷-LYV, YVPKPXX:APVKL:KPLS-AA¹⁷-LYV, TVPKPXX:APVQL:KPLS-AA¹⁷-LYV, AVPKAXX:APVKL:KPLS-AA¹⁷-LYV, KVGKAXX:APVKL:KPLS-AA¹⁷-LYV, KASKAXX:APVKL:KPLS-AA¹⁷-LYV, GSAGPXX:APVKM:KPLS-AA¹⁷-LYV, AAPASXX:APVRL:KPLS-AA¹⁷-LYV, STPPTXX:APVRL:KPLS-AA¹⁷-LYV, HVPKPXX:APVKL:KPLS-AA¹⁷-LYV, ASAAPXX:APVAL:KPLS-AA¹⁷-LYV, ASASPXX:APVDL:KPLS-AA¹⁷-LYV, KIPKAXX:VPTEL:KPLS-AA¹⁷-LYV, GIPEPXX:VPEKM:KPLS-AA¹⁷-LYV, SIPKAXX:VPTEL:KPLS-AA¹⁷-LYV, HVTKPTX:APTKL:KPLS-AA¹⁷-LYV, YVPKPXX:APTKL:KPLS-AA¹⁷-LYV, TVPKPXX:APTQL:KPLS-AA¹⁷-LYV, AVPKAXX:APTKL:KPLS-AA¹⁷-LYV, KVGKAXX:VPTKL:KPLS-AA¹⁷-LYV, KASKAXX:VPTKL:KPLS-AA¹⁷-LYV, GSAGPXX:TPTKM:KPLS-AA¹⁷-LYV, AAPASXX:VPARL:KPLS-AA¹⁷-LYV, STPPTXX:VPTRL:KPLS-AA¹⁷-LYV, HVPKPXX:APTKL:KPLS-AA¹⁷-LYV, ASAAPXX:VPQAL:KPLS-AA¹⁷-LYV, ASASPXX:VSQDL:KPLS-AA¹⁷-LYV, ASASPXX:VPQDL:KPLS-AA¹⁷-LYV, NDEGLEX:VPTEE:KPLS-AA¹⁷-LYV, NDEGLEX:VPTGQ:KPLS-AA¹⁷-LYV, SSVKXQP:SRVHH:KPLS-AA¹⁷-LYV, RNVQXRP:TQVQL:KPLS-AA¹⁷-LYV, KIPKAXX:VPQEL:EPLP-AA¹⁷-VYY, GIPEPXX:VPQKM:EPLP-AA¹⁷-VYY, SIPKAXX:VPQEL:EPLP-AA¹⁷-VYY, HVTKPTX:VPQKL:EPLP-AA¹⁷-VYY, YVPKPXX:VPQKL:EPLP-AA¹⁷-VYY, TVPKPXX:VPQQL:EPLP-AA¹⁷-VYY, AVPKAXX:VPQKL:EPLP-AA¹⁷-VYY, KVGKAXX:VPQKL:EPLP-AA¹⁷-VYY, KASKAXX:VPQKL:EPLP-AA¹⁷-VYY, GSAGPXX:VPQKM:EPLP-AA¹⁷-VYY, AAPASXX:VPQRL:EPLP-AA¹⁷-VYY, STPPTXX:VPQRL:EPLP-AA¹⁷-VYY, HVPKPXX:VPQKL:EPLP-AA¹⁷-VYY, RVPSTXX:VPQKT:EPLP-AA¹⁷-VYY, ASASPXX:VPQDL:EPLP-AA¹⁷-VYY, KIPKAXX:VPTEL:EPLP-AA¹⁷-VYY, GIPEPXX:VPEKM:EPLP-AA¹⁷-VYY, SIPKAXX:VPTEL:EPLP-AA¹⁷-VYY, HVTKPTX:APTKL:EPLP-AA¹⁷-VYY, YVPKPXX:APTKL:EPLP-AA¹⁷-VYY, TVPKPXX:APTQL:EPLP-AA¹⁷-VYY, AVPKAXX:APTKL:EPLP-AA¹⁷-VYY, KVGKAXX:VPTKL:EPLP-AA¹⁷-VYY, KASKAXX:VPTKL:EPLP-AA¹⁷-VYY, GSAGPXX:TPTKM:EPLP-AA¹⁷-VYY, AAPASXX:VPARL:EPLP-AA¹⁷-VYY, STPPTXX:VPTRL:EPLP-AA¹⁷-VYY, HVPKPXX:APTKL:EPLP-AA¹⁷-VYY, RVPSTXX:APVKT:EPLP-AA¹⁷-VYY, ASASPXX:VSQDL:EPLP-AA¹⁷-VYY, NDEGLEX:VPTEE:EPLP-AA¹⁷-VYY, NDEGLEX:VPTGQ:EPLP-AA¹⁷-VYY, SSVKXQP:SRVHH:EPLP-AA¹⁷-VYY, RNVQXRP:TQVQL:EPLP-AA¹⁷-VYY, KIPKAXX:VSQEL:EPLT-AA¹⁷-LYY, GIPEPXX:VSQKM:EPLT-AA¹⁷-LYY, SIPKAXX:VSQEL:EPLT-AA¹⁷-LYY, HVTKPTX:VSQKL:EPLT-AA¹⁷-LYY, YVPKPXX:VSQKL:EPLT-AA¹⁷-LYY, TVPKPXX:VSQQL:EPLT-AA¹⁷-LYY, AVPKAXX:VSQKL:EPLT-AA¹⁷-LYY, KVGKAXX:VSQKL:EPLT-AA¹⁷-LYY, KASKAXX:VSQKL:EPLT-AA¹⁷-LYY, GSAGPXX:VSQKM:EPLT-AA¹⁷-LYY, AAPASXX:VSQRL:EPLT-AA¹⁷-LYY, STPPTXX:VSQRL:EPLT-AA¹⁷-LYY, HVPKPXX:VSQKL:EPLT-AA¹⁷-LYY, RVPSTXX:VSQKT:EPLT-AA¹⁷-LYY, ASAAPXX:VSQAL:EPLT-AA¹⁷-LYY, ASASPXX:VSQDL:EPLT-AA¹⁷-LYY, KIPKAXX:VPTEL:EPLT-AA¹⁷-LYY, GIPEPXX:VPEKM:EPLT-AA¹⁷-LYY, SIPKAXX:VPTEL:EPLT-AA¹⁷-LYY, HVTKPTX:APTKL:EPLT-AA¹⁷-LYY, YVPKPXX:APTKL:EPLT-AA¹⁷-LYY, TVPKPXX:APTQL:EPLT-AA¹⁷-LYY, AVPKAXX:APTKL:EPLT-AA¹⁷-LYY, KVGKAXX:VPTKL:EPLT-AA¹⁷-LYY, KASKAXX:VPTKL:EPLT-AA¹⁷-LYY, GSAGPXX:TPTKM:EPLT-AA¹⁷-LYY, AAPASXX:VPARL:EPLT-AA¹⁷-LYY, STPPTXX:VPTRL:EPLT-AA¹⁷⁻LYY, HVPKPXX:APTKL:EPLT-AA¹⁷-LYY, RVPSTXX:APVKT:EPLT-AA¹⁷-LYY, ASAAPXX:VPQAL:EPLT-AA¹⁷-LYY, NDEGLEX:VPTEE:EPLT-AA¹⁷-LYY, NDEGLEX:VPTGQ:EPLT-AA¹⁷-LYY, SSVKXQP:SRVHH:EPLT-AA¹⁷-LYY, RNVQXRP:TQVQL:EPLT-AA¹⁷-LYY, KIPKAXX:VPQEL:EPLT-AA¹⁷-LYY, GIPEPXX:VPQKM:EPLT-AA¹⁷-LYY, SIPKAXX:VPQEL:EPLT-AA¹⁷-LYY, HVTKPTX:VPQKL:EPLT-AA¹⁷-LYY, YVPKPXX:VPQKL:EPLT-AA¹⁷-LYY, TVPKPXX:VPQQL:EPLT-AA¹⁷-LYY, AVPKAXX:VPQKL:EPLT-AA¹⁷-LYY, KVGKAXX:VPQKL:EPLT-AA¹⁷-LYY, KASKAXX:VPQKL:EPLT-AA¹⁷-LYY, GSAGPXX:VPQKM:EPLT-AA¹⁷-LYY, AAPASXX:VPQRL:EPLT-AA¹⁷-LYY, STPPTXX:VPQRL:EPLT-AA¹⁷-LYY, HVPKPXX:VPQKL:EPLT-AA¹⁷-LYY, RVPSTXX:VPQKT:EPLT-AA¹⁷-LYY, ASASPXX:VPQDL:EPLT-AA¹⁷-LYY, NDEGLEX:VPTGQ:SNIT-AA¹⁷-QIM, GIPEPXX:VPEKM:SNIT-AA¹⁷-QIM, HVTKPTX:APTKL:SNIT-AA¹⁷-QIM, YVPKPXX:APTKL:SNIT-AA¹⁷-QIM, TVPKPXX:APTQL:SNIT-AA¹⁷-QIM, AVPKAXX:APTKL:SNIT-AA¹⁷-QIM, GSAGPXX:TPTKM:SNIT-AA¹⁷-QIM, AAPASXX:VPARL:SNIT-AA¹⁷-QIM, HVPKPXX:APTKL:SNIT-AA¹⁷-QIM, RVPSTXX:APVKT:SNIT-AA¹⁷-QIM, ASAAPXX:VPQAL:SNIT-AA¹⁷-QIM, ASASPXX:VSQDL:SNIT-AA¹⁷-QIM, ASASPXX:VPQDL:SNIT-AA¹⁷-QIM, SSVKXQP:SRVHH:SNIT-AA¹⁷-QIM, RNVQXRP:TQVQL:SNIT-AA¹⁷-QIM, RNVQXRP:SRVQL:RSVK-AA¹⁷-AKV, KIPKAXX:VPTEL:RSVK-AA¹⁷-AKV, GIPEPXX:VPEKM:RSVK-AA¹⁷-AKV, SIPKAXX:VPTEL:RSVK-AA¹⁷-AKV, HVTKPTX:APTKL:RSVK-AA¹⁷-AKV, YVPKPXX:APTKL:RSVK-AA¹⁷-AKV, TVPKPXX:APTQL:RSVK-AA¹⁷-AKV, AVPKAXX:APTKL:RSVK-AA¹⁷-AKV, KVGKAXX:VPTKL:RSVK-AA¹⁷-AKV, KASKAXX:VPTKL:RSVK-AA¹⁷-AKV, GSAGPXX:TPTKM:RSVK-AA¹⁷-AKV, AAPASXX:VPARL:RSVK-AA¹⁷-AKV, STPPTXX:VPTRL:RSVK-AA¹⁷-AKV, HVPKPXX:APTKL:RSVK-AA¹⁷-AKV, RVPSTXX:APVKT:RSVK-AA¹⁷-AKV, ASAAPXX:VPQAL:RSVK-AA¹⁷-AKV, ASASPXX:VSQDL:RSVK-AA¹⁷-AKV, ASASPXX:VPQDL:RSVK-AA¹⁷-AKV, NDEGLEX:VPTEE:RSVK-AA¹⁷-AKV, NDEGLEX:VPTGQ:RSVK-AA¹⁷-AKV, RNVQXRP:TQVQL:RSVK-AA¹⁷-AKV, SSVKXQP:TQVHH:RPVQ-AA¹⁷-RKI, KIPKAXX:VPTEL:RPVQ-AA¹⁷-RKI, GIPEPXX:VPEKM:RPVQ-AA¹⁷-RKI, SIPKAXX:VPTEL:RPVQ-AA¹⁷-RKI, HVTKPTX:APTKL:RPVQ-AA¹⁷-RKI, YVPKPXX:APTKL:RPVQ-AA¹⁷-RKI, TVPKPXX:APTQL:RPVQ-AA¹⁷-RKI, AVPKAXX:APTKL:RPVQ-AA¹⁷-RKI, KVGKAXX:VPTKL:RPVQ-AA¹⁷-RKI, KASKAXX:VPTKL:RPVQ-AA¹⁷-RKI, GSAGPXX:TPTKM:RPVQ-AA¹⁷-RKI, AAPASXX:VPARL:RPVQ-AA¹⁷-RKI, STPPTXX:VPTRL:RPVQ-AA¹⁷-RKI, HVPKPXX:APTKL:RPVQ-AA¹⁷-RKI, RVPSTXX:APVKT:RPVQ-AA¹⁷-RKI, ASAAPXX:VPQAL:RPVQ-AA¹⁷-RKI, ASASPXX:VSQDL:RPVQ-AA¹⁷-RKI, ASASPXX:VPQDL:RPVQ-AA¹⁷-RKI, NDEGLEX:VPTEE:RPVQ-AA¹⁷-RKI, NDEGLEX:VPTGQ:RPVQ-AA¹⁷-RKI and SSVKXQP:SRVHH:RPVQ-AA17-RKI; and wherein AA¹⁷ is selected from the group consisting of G, A, V, L, I, P, F, M, W, T and S (in particular is selected from the group consisting of M, I, L, V and T).

[0415] In one example, said cyclic GFR-binding compound is a synthetic molecule as defined herein in the definition section.

[0416] In one particular example, said cyclic GFR-binding compound is a synthetic peptide, or a variant or analog thereof, or a cyclic peptidomimetic.

[0417] In one most particular example, said cyclic GFR-binding compound is a cyclic synthetic peptide.

[0418] In one example, a length of said cyclic GFR-binding compound, in solution, such as in a physiologically acceptable solvent such as water or PBS, is comprised between about 6 and about 20 nm, preferably between about 6 and about 16 nm, as determined using the standard «3D» procedure described above.

[0419] In one particular example, said cyclic GFR-binding compounds may be any one of peptides of SEQ ID NO: 4803 to 13564.

[0420] LINKER Suitable for Implementing Cyclic GFR-Compounds' Embodiments

[0421] In one particular example, said LINKER has a Mw comprised between 450 and 4,500 Daltons, in particular comprised between about 600 and about 4,500 Da, more particularly between about 600 and about 4,000 Da, and even more particularly between about 600 and about 3,500 Da.

[0422] The chemical nature of said LINKER is not meant to be particularly limited and may be any organic molecule capable of covalently connecting two ends of a peptide or a peptidomimetic such as PEP(A) or PEP(C)-PEP12 so as to form a cyclic compound and so long as LINKER provides sufficient cycle stability for the pharmaceutical association, combination or composition as defined herein to promote the conversion or recoding of a neoplastic cell into a non-neoplastic cell. LINKER may thus be, for example, in certain embodiments, a peptide, or variant, analog or peptidomimetic thereof, a polysaccharide, a polynucleotide, a saturated or unsaturated hydrocarbon chain, or a mixture thereof.

[0423] For example, in certain embodiments, LINKER□is a peptide with 6 to 31 amino acids. In one particular example, LINKER□is a peptide with 6 to 25 amino acids. In one particular example, LINKER is a peptide with 8 to 25 amino acids. In one most particular example, LINKER□is a peptide with 8 to 20 amino acids.

[0424] Thus, in one particular example, said cyclic GFR-binding compound is a peptide, a variant or analog thereof as defined herein, with between 10-60 (in particular between 15-60, more particularly between 10-55, and even more particularly between 15-55) amino acids or with between 10-35 (in particular between 15-35, more particularly between 10-30, and even more particularly between 15-30) amino acids, comprising a peptide, a variant or analog thereof of general formula (IIIa); wherein one end of LINKER interacts covalently with one end of PEP(A); wherein PEP(A) comprises PEP1 or PEP12; wherein LINKER is a peptide comprising 6 to 31 amino acids (in particular 6 to 25, 8 to 25, or 8 to 20 amino acids).

[0425] Thus, in one particular example, said cyclic GFR-binding compound is a cyclic peptide, a variant or analog thereof, or a cyclic peptidomimetic as defined herein, with between 10-60 (in particular between 15-60, more particularly between 10-55, and even more particularly between 15-55) amino acids or with between 10-35 (in particular between 15-35, more particularly between 10-30, and even more particularly between 15-30) amino acids, comprising a peptide, a variant or analog thereof, or a peptidomimetic having the following general formula (IIIb); wherein one end of a first LINKER interacts covalently with one end of PEP(A); wherein one end of a second LINKER interacts covalently with another end of PEP(A); wherein another end of a first LINKER interacts covalently with another end of a second LINKER; wherein PEP(A) comprises PEP1 or PEP12; wherein LINKER are independently a peptide comprising 6 to 31 amino acids (in particular 6 to 25, 8 to 25, or 8 to 20 amino acids).

[0426] Thus, in one particular example, said cyclic GFR-binding compound is a peptide, a variant or analog thereof as defined herein, with between 10-60 (in particular between 15-60, more particularly between 10-55, and even more particularly between 15-55) amino acids or with between 10-35 (in particular between 15-35, more particularly between 10-30, and even more particularly between 15-30) amino acids, comprising a peptide, a variant or analog thereof of general formula (IVa); wherein LINKER is a peptide comprising 6 to 31 amino acids (in particular 6 to 25, 8 to 25, or 8 to 20 amino acids); wherein PEP12 is a peptide with 8 amino acids of formula PEP1-AA¹⁷-PEP11 as already defined herein; wherein PEP1, PEP11 and PEP(C) are as already defined herein; wherein AA¹³ may be an N-terminal amino acid or a C-terminal amino acids; wherein AA²⁰ may be an N-terminal amino acid or a C-terminal amino acid; wherein one end of LINKER interacts covalently with one end of PEP12 via AA²⁰; wherein another end of LINKER interacts covalently with one end of PEP(C); wherein another end of PEP(C) interacts covalently with PEP12 via AA¹³.

[0427] Thus, in one particular example, said cyclic GFR-binding compound is a cyclic peptide, a variant or analog thereof, or a cyclic peptidomimetic as defined herein, with between 10-60 (in particular between 15-60, more particularly between 10-55, and even more particularly between 15-55) amino acids or with between 10-35 (in particular between 15-35, more particularly between 10-30, and even more particularly between 15-30) amino acids, comprising a peptide, a variant or analog thereof, or a peptidomimetic having the following general formula (IVb); wherein LINKER are independently a peptide comprising 6 to 31 amino acids (in particular 6 to 25, 8 to 25, or 8 to 20 amino acids); wherein PEP12 is a peptide with 8 amino acids of formula PEP1-AA¹⁷-PEP11 as defined herein; wherein PEP2 is a peptide with five amino acids as already defined herein; wherein one end of PEP(C) interacts covalently with PEP12 via one end of PEP1; wherein one end of a first LINKER interacts covalently with one end of PEP12 via one end of PEP11; wherein one end of a second LINKER interacts covalently with another end of PEP(C); wherein another end of a first LINKER interacts covalently with another end of a second LINKER; wherein PEP(C) is a peptide with at least 5 amino acids, in particular a peptide with between 5 and 12 amino acids.

[0428] Thus, in one particular example, said cyclic GFR-binding compound is a peptide, a variant or analog thereof as defined herein, with between 10-60 (in particular between 15-60, more particularly between 10-55, and even more particularly between 15-55) amino acids or with between 10-35 (in particular between 15-35, more particularly between 10-30, and even more particularly between 15-30) amino acids, having any one of the general formula (VII) to (XXIII); wherein LINKER is a peptide comprising 6 to 31 amino acids (in particular 6 to 25, 8 to 25, or 8 to 20 amino acids).

[0429] In certain embodiments, said cyclic GFR-binding compound is a cyclic peptidomimetic as defined herein, with between 10-60 (in particular between 15-60, more particularly between 10-55, and even more particularly between 15-55) amino acids or with between 10-35 (in particular between 15-35, more particularly between 10-30, and even more particularly between 15-30) amino acids, of general formula (IVa) or (IVb); wherein LINKER is not a peptide but may comprise amino acids or peptides in covalent or non-covalent (preferably covalent) association with other groups or residues other than amino acids or peptides.

[0430] In one particular example, LINKER comprises (or is) a peptide of general formula (XXIV):

*AA²⁰¹-AA²⁰²-AA²⁰³-AA²⁰⁴-AA²⁰⁵-AA²⁰⁶-AA²⁰⁷-AA²⁰⁸-AA²⁰⁹** (XXIV)

wherein said peptide of formula (XXIV) may be selected from the group consisting of *AA^{III}-AA^{I}-AA^{I}-AA^{II}-AA^{VII}-AA^{XII}-AA^{XII}-AA^{XIII}-AA^{XIII}**, *AA^{III}-AA^{I}-AA^{VI}-AA^{II}-AA^{VII}-AA^{XII}-AA^{XII}-AA^{XIII}-AA^{XIII}**, *AA^{III}-AA^{I}-AA^{I}- AA^{II}-AA^{II}-AA^{XII}-AA^{XII}-AA^{XIII}-AA^{XIII}**, *AA^{III}-AA^{I}-AA^{II}-AA^{II}-AA^{VII}-AA^{XII}-AA^{XII}-AA^{XIII}-AA^{XIII}**, *AA^{III}-AA^{I}-AA^{II}-AA^{IV}- AA^{IV}-AA^{XII}-AA^{XII}-AA^{XIII}-AA^{XIII}**, *AA^{II}-AA^{I}-AA^{II}-AA^{II}-AA^{II}-AA^{XII}-AA^{XII}-AA^{XIII}-AA^{XIII}**, *AA^{III}-AA^{III}-AA^{II}-AA^{VII}- AA^{II}-AA^{XII}-AA^{XII}-AA^{XII}-AA^{XIII}**, *AA^{III}-AA^{I}-AA^{I}-AA^{II}-AA^{II}-AA^{XII}-AA^{XII}-AA^{XIII}-AA^{XIII}**, *AA^{V}-AA^{V}-AA^{VII}-AA^{VII}-AA^{XII}-AA^{XII}-AA^{XIII}-AA^{XIII}**, *AA^{VIII}-AA^{V}-AA^{VII}-AA^{II}-AA^{XII}-AA^{XII}-AA^{XIII}-AA^{XIII}** and *AA^{V}-AA^{V}-AA^{VII}-AA^{II}-AA^{XII}-AA^{XII}-AA^{XIII}-AA^{XIII}**; wherein AA^{I} is any amino acid as defined herein, AA^{II} is any polar amino acid as defined herein, AA^{III} is any acidic amino acid as defined herein, AA^{V} is any aliphatic amino acid as defined herein, AA^{V} is any apolar amino acid as defined herein, AA^{VI} is any aromatic amino acid as defined herein, AA^{VII} is any basic amino acid as defined herein, AA^{VIII} is L or I as defined herein, AA^{XII} is an amino acid selected from the group consisting of G, A, V, L, I, P, M, K, R, H, Y and E, wherein AA^{XIII} is absent, AA^{II} or AA^{VII}, preferably absent; and wherein any one of the fragment AA²⁰¹, AA²⁰¹-AA²⁰², AA²⁰¹-AA²⁰²-AA²⁰³, AA²⁰¹-AA²⁰²-AA²⁰³-AA²⁰⁴, AA²⁰¹-AA²⁰²-AA²⁰³-AA²⁰⁴-AA²⁰⁵, AA²⁰¹-AA²⁰²-AA²⁰³-AA²⁰⁴-AA²⁰⁵-AA²⁰⁶, AA²⁰¹-AA²⁰²-AA²⁰³-AA²⁰⁴-AA²⁰⁵-AA²⁰⁶-AA²⁰⁷, AA²⁰³-AA²⁰⁴-AA²⁰⁵-AA²⁰⁶-AA²⁰⁷-AA²⁰⁸-AA²⁰⁹, AA²⁰⁴-AA²⁰⁵-AA²⁰⁶-AA²⁰⁷-AA²⁰⁸-AA²⁰⁹, AA²⁰⁵-AA²⁰⁶-AA²⁰⁷-AA²⁰⁸-AA²⁰⁹, AA²⁰⁶-AA²⁰⁷-AA²⁰⁸-AA²⁰⁹, AA²⁰⁷-AA²⁰⁸-AA²⁰⁹, AA²⁰⁸-AA²⁰⁹ or AA²⁰⁹, may be absent. In the peptides of formula (XXIV), any one of the amino acid labelled “*” or the amino acid labelled “**” is an N-terminal amino acid and the other is a C-terminal amino acid.

[0431] For instance, in the peptide of formula *AA^{III}-AA^{I}-AA^{I}-AA^{II}-AA^{VII}-AA^{XII}-AA^{XII}-AA^{XIII}-AA^{XIII}** (XXIV-1), AA^{III} occupies position AA²⁰¹, *AA^{I} occupies position AA²⁰², AA^{I} occupies position AA²⁰³, AA^{II} occupies position AA²⁰⁴, AA^{VII} occupies position AA²⁰⁵, AA^{XII} occupies position AA²⁰⁶, AA^{XII} occupies position AA²⁰⁷, AA^{XIII} occupies position AA²⁰⁸ and AA^{XIII}** occupies position AA²⁰⁹.

[0432] Likewise, in the peptide of formula *AA^{V}-AA^{V}-AA^{V}-AA^{VII}-AA^{II}-AA^{XII}-AA^{XII}-AA^{XIII}-AA^{XIII}** (XXIV-1) AA^{V} occupies position AA²⁰¹, AA^{V} occupies position AA²⁰², AA^{VII} occupies position AA²⁰³, AA^{II} occupies position AA²⁰⁴, AA^{XII} occupies position AA²⁰⁵, AA^{XII} occupies position AA²⁰⁶, AA^{XIII} occupies position AA²⁰⁷, AA^{XIII} occupies position AA²⁰⁸ and position AA²⁰⁹ is vacants.

[0433] In one example, LINKER may thus comprise or be any one of the following peptides:

[0434] *AA²⁰¹-AA²⁰²-AA²⁰³-AA²⁰⁴-AA²⁰⁵-AA²⁰⁶-AA²⁰⁷-AA²⁰⁸** (XXIV-1); *AA²⁰¹-AA²⁰²-AA²⁰³-AA²⁰⁴-AA²⁰⁵-AA²⁰⁶-AA²⁰⁷** (XXIV-2); *AA²⁰¹-AA²⁰²-AA²⁰³-AA²⁰⁴-AA²⁰⁵-AA²⁰⁶** (XXIV-3); *AA²⁰¹-AA²⁰²-AA²⁰³-AA²⁰⁴-AA²⁰⁵** (XXIV-4); *AA²⁰¹-AA²⁰²-AA²⁰³-AA²⁰⁴** (XXIV-5); *AA²⁰¹-AA²⁰²-AA²⁰³** (XXIV-6); *AA²⁰¹-AA²⁰²** (XXIV-7); *AA²⁰²-AA²⁰³-AA²⁰⁴-AA²⁰⁵-AA²⁰⁶-AA²⁰⁷-AA²⁰⁸-AA²⁰⁹** (XXIV-8); *AA²⁰³-AA²⁰⁴-AA²⁰⁵-AA²⁰⁶-AA²⁰⁷-AA²⁰⁸-AA²⁰⁹** (XXIV-9); *AA²⁰⁴-AA²⁰⁵-AA²⁰⁶-AA²⁰⁷-AA²⁰⁸-AA²⁰⁹** (XXIV-10); *AA²⁰⁵-AA²⁰⁶-AA²⁰⁷-AA²⁰⁷-AA²⁰⁸-AA²⁰⁹** (XXIV-11); *AA²⁰⁶-AA²⁰⁷-AA²⁰⁸-AA²⁰⁹** (XXIV-12); *AA²⁰⁷-AA²⁰⁸-AA²⁰⁹** (XXIV-13); *AA²⁰⁸-AA²⁰⁹** (XXIV-14); wherein, for instance, said peptide of formulae (XXIV-1) may thus be selected from the group consisting of *AA^{III}-AA^{I}-AA^{I}-AA^{II}-AA^{VII}-AA^{XII}-AA^{XII}-AA^{XIII}**, *AA^{III}-AA^{I}-AA^{VI}-AA^{II}-AA^{VII}-AA^{XII}-AA^{XII}-AA^{XIII}**, *AA^{III}-AA^{I}-AA^{I}-AA^{II}-AA^{II}-AA^{XII}-AA^{XII}-AA^{XIII}**, *AA^{III}-AA^{I}-AA^{II}-AA^{II}-AA^{VII}-AA^{XII}-AA^{XII}-AA^{XIII}**, *AA^{III}-AA^{I}- AA^{II}-AA^{IV}-AA^{IV}-AA^{XII}-AA^{XII}-AA^{XIII}**, *AA^{II}-AA^{I}-AA^{II}-AA^{II}-AA^{II}-AA^{XII}-AA^{XII}-AA^{XIII}**, *AA^{III}-AA^{III}-AA^{II}-AA^{VII}-AA^{II}-AA^{XII}-AA^{XII}-AA^{XIII}**, *AA^{III}-AA^{I}-AA^{I}-AA^{I}-AA^{II}-AA^{II}-AA^{XII}-AA^{XII}-AA^{XIII}**, *AA^{V}-AA^{V}-AA^{VII}-AA^{VII}-AA^{XII}-AA^{XII}-AA^{XIII}**, *AA^{VII}-AA^{V}-AA^{VII}-AA^{II}-AA^{XII}-AA^{XII}-AA^{XIII}** and *AA^{V}-AA^{V}-AA^{VII}-AA^{II}-AA^{XII}-AA^{XII}-AA^{XIII}**.

[0435] In one particular example, LINKER comprises a peptide of formula (XXIV), (XXIV-2) or (XXIV-4).

[0436] In one example, LINKER comprises (or is) a poly-(aliphatic amino acid) peptide such as poly-alanine peptide (A)ₙ, or a poly-glycine (G)ₙ, n being an integer comprised between 2 and 31, in particular between 2 to 25, more particularly between 2 and 20, such as A-A-A-A-A-A-A-A-A, A-A-A-A-A-A-A, A-A-A-A-A, G-G-G-G-G-G-G-G-G, G-G-G-G-G-G-G or G-G-G-G-G.

[0437] In one particular example, LINKER comprises (or is) a peptide of general formulae (XXIV) to (XXIV-14), more particularly (XXIV), (XXIV-2) or (XXIV-4), and/or a poly-(aliphatic amino acid)ₙ peptide as defined herein.

[0438] For example, in certain embodiments, LINKER□is a polysaccharide comprising 6 to 31 saccharides. In one particular example, LINKER□is a polysaccharide comprising 6 to 25 saccharides. In one particular example, LINKER is a polysaccharide comprising 8 to 25 saccharides. In one most particular example, LINKER□is a polysaccharide comprising 8 to 20 saccharides. Suitable monosaccharides include, but are not limited to, glucose (dextrose), fructose (levulose) and galactose. Monosaccharides are the building blocks of disaccharides (such as sucrose) and polysaccharides (such as celluloses, chitosans, ulvanes and starches). Further, each carbon atom that supports a hydroxyl group (except for the first and last) is chiral, giving rise to a number of isomeric forms all with the same chemical formula. A large number of biologically important modified monosaccharides exists e.g. amino sugars such as Galactosamine, Glucosamine, Sialic acid, N-Acetylglucosamine, and sulfosugars such as Sulfoquinovose. All of these monosaccharide and polysaccharide derivatives may be used as LINKER in the present invention.

[0439] For example, in certain embodiments, LINKER□is a polynucleotide comprising 6 to 31 nucleotides. In one particular example, LINKER□is a polynucleotide comprising 6 to 25 nucleotides. In one particular example, LINKER is a polynucleotide comprising 8 to 25 nucleotides. In one most particular example, LINKER□is a polynucleotide comprising 8 to 20 nucleotides. Suitable nucleotides include adenine (A), guanine (G), thymine (T), cytosine (C), uracil (U) and derivatives, analogues and/or mimetic thereof.

[0440] For example, in certain embodiments, LINKER is a saturated or unsaturated hydrocarbon chain comprising between 16 and 60, between 16 and 45, or between 16 and 30 carbon atoms, wherein said hydrocarbon chain is optionally interrupted by one or more non-carbon atom, preferably between 1 and 16, between 1 and 12 or between 1 and 8 non-carbon atoms as appropriate, wherein said non-carbon atom is selected from the group consisting of —O—, —S—, —C(═O), —SO₂—, —N(Ri)(C═O)—, and —N(Ri)-, wherein Ri is selected from the group consisting of a hydrogen atom, a C1-C6 alkyl group and an aryl group, and wherein said hydrocarbon chain is non-substituted or substituted by at least one radical selected from the group consisting of a halogen, a monosaccharide, a poly(1-6)saccharide, a nucleotide, a poly(1-6)nucleotide, a C1-C10 alkyl group and an aryl group.

[0441] In one example, LINKER□is a saturated or unsaturated hydrocarbon chain of at most 10 nanometres (nm) in length, preferably at most 144 nanometres (nm) in length, in particular at most 120 nm, 96 nm, 84 nm or 72 nm as determined using the standard «2D» procedure described above.

[0442] In one example, such saturated or unsaturated hydrocarbon chains include polyethylene glycol (PEG) or any one of its derivatives.

[0443] More particularly, LINKER is a octapeptide (8 amino acids). More particularly, LINKER is a nonapeptide (9 amino acids). More particularly, LINKER is a decapeptide (10 amino acids). More particularly, LINKER is a hendecapeptide (11 amino acids). More particularly, LINKER is a dodecapeptide (12 amino acids). More particularly, LINKER is a tridecapeptideo (13 amino acids). More particularly, LINKER is a tetradecapeptide (14 amino acids). More particularly, LINKER is a pentadecapeptide (15 amino acids). More particularly, LINKER is a hexadecapeptide (16 amino acids). More particularly, LINKER is a heptadecapeptide (17 amino acids). More particularly, LINKER is an octadecapeptide (18 amino acids).

[0444] More particularly, LINKER is an enneadecapeptide (19 amino acids). More particularly, LINKER is an icosapeptide (20 amino acids).

[0445] In one particular example, LINKER comprises one or more of a peptide selected from the group consisting of DENEKVV, DENKNVV, DEYDKVV, DDSSNVI, DSSNNVI, DDMGVPT, DKGVVTY, NDKQQII, DAANNVV, DSANNVV, DDSSNVI, DNGRVLL, VGRKPKV, IGKTPKI, VGRTPKV, RIKPHQGQH, EYVRKKPKL, EIVRKKPIF, EYVRKKP, EIVRKKP, polyalanine (A₁₋₁₂) (preferably A₂₋₈) and polyglycine (G₁₋₁₂) (preferably G₂₋₈).

[0446] For example, in certain embodiments, to synthetise cyclic GFR-binding compounds of the present disclosure, the covalent bonds between e.g. LINKER, PEP(A), PEP(C) or PEP1 to PEP12, may be created through the chemical reaction between a free amine moiety e.g. of a N-terminal amino acid (—NH₂ or —NH₃X, X generally being a halide anion selected from the group consisting of F⁻, Cl⁻ and Br⁻), typically acting as a nucleophile, and an electrophile moiety of e.g. a C-terminal amino acid. Such an electrophile moiety includes, but is not limited to, alkyl halides (—CR₂—X), alcohols (—CR₂—OH), acid chlorides (—C(═O)X), esters, (—C(═O)OR), phosphate (—OP(OR)₃), phosphinate (—OP(OR)R2), phosphonates (—OP(OR)₂R), phosphonite (—P(OR)₂R) or sulfonic esters (—SO₂OR). More particularly, this covalent bond is an amide bond (in particular a peptide bond) formed through conventional peptide synthesis using conventional coupling reagents as already defined herein.

[0447] For example, in certain embodiments, to synthetise cyclic GFR-binding compounds of the present disclosure, the covalent bonds between e.g. LINKER, PEP(A), PEP(C) or PEP1 to PEP12, may be created through the chemical reaction between a free carboxylic acid moiety e.g. of a C-terminal amino acid (—CO₂H or —CO₂X, X generally being an inorganic cation such as alkaline cations (e.g. Li⁺, Na⁺ or K⁺) or an organic cation such as ammonium cations), typically acting as an electrophile, and a nucleophile moiety of e.g. an N-terminal amino acid. Such a nucleophile moiety includes, but is not limited to, alcohols (—OH), amines (—NH₂), phosphines (—PR₃), thiols (—SH). More particularly, this covalent interaction is a peptide bond formed through conventional peptide synthesis using conventional coupling reagents as already defined herein.

[0448] Cyclisation of a cyclic GFR-binding compound of the present disclosure may be carried out as described above using conventional peptide bond formation procedures, click chemistry, formation of disulphide bonds, etc.

[0449] The present disclosure provides pharmaceutical associations, combinations and compositions, methods and uses for converting or recoding any neoplastic cell into a non-neoplastic cell (in particular, a functional and healthy cell) of any type. In some cases, the cell type of the converted or recoded non-neoplastic cell may be selected/chosen by e.g. a person providing the treatment to a subject.

[0450] In one example, said pharmaceutical association, combination or composition induces the conversion of a neoplastic cell into a physiologically functional and/or healthy cell of any cell lineage including, but not limited to, bone cell, chondrocytic cell, neuron cell, fibroblast, vascular cell, ligament cell, tendon cell, epithelial cell, retina photoreceptor cell, muscle cell, glandular cell, myoepithelial cell, subepithelial interstitial cell, smooth muscle cell, blood cell, gastrointestinal cell, adipocyte, Sertoli cells, Leydig cell, Germ cell and renal cell lineages. Such cells include any progenitor or precursor cells or any partially or fully differentiated cells of these lineages. More generally, the present disclosure includes the treatment of any neoplastic cell of any type and cell lineage using the associations, combinations, compositions, methods and uses as defined herein.

[0451] For example, in certain embodiments, a neoplastic cell of a bone tissue (i.e. a neoplastic cell from the bone cell lineage) has been, may be or will be the cause of the development of a neoplastic bone disease (e.g. bone cancer). Inducing the conversion of this neoplastic bone cell into a physiologically functional and/or healthy cell (any physiologically functional and/or healthy cell) of the bone cell lineage may protect a subject/patient carrying this cell from bone cancer. In some cases, it may be preferable and/or satisfying and/or more practical to induce the conversion of a neoplastic bone cell into a functional and/or healthy cell of a different cell lineage i.e. not a cell from a bone lineage, such as, for example, in certain embodiments, a cell from a chondrocytic cell lineage, a fibroblast lineage or a ligament/tendon cell lineage.

[0452] In one example, a neoplastic cell of a soft tissue such as a muscle, vascular, skin or kidney tissue (i.e. a neoplastic cell from the muscle, vascular, skin or kidney cell lineage, respectively) has been, may be or will be the cause of the development of a neoplastic muscle, vascular, skin or kidney disease (e.g. Rhabdomyosarcoma, Hemangiosarcoma, basal cell carcinoma or Squamous cell carcinoma, respectively). Inducing the conversion of any of these neoplastic cells into a physiologically functional and/or healthy cell (any physiologically functional and/or healthy cell) of the muscle, vascular, skin or kidney cell lineage, respectively, may protect a subject carrying any of these cells from the diseases mentioned above. In some cases, it may be preferable and/or satisfying and/or more practical to induce the conversion of, e.g. a neoplastic muscle, vascular, skin or kidney cell into a functional and/or healthy cell of a different cell lineage i.e. not a cell from a muscle, vascular, skin or kidney lineage, such as, for example, in certain embodiments, a cell from a bone cell lineage so that a medical practitioner such as a surgeon, may be able to surgically remove the newly converted bone cells more conveniently. The surgery may be carried out purely for aesthetic reasons and/or because of a discomfort and/or to avoid the possibility of e.g. infections, complications, etc.

[0453] For example, in certain embodiments, a neoplastic cell of an adipose tissue (i.e. a neoplastic cell from the adipocyte lineage) has been, may be or will be the cause of the development of a neoplastic adipose tissue disease (e.g. adipose tissue cancer or lipoma). Several treatment routes may be envisaged to induce the conversion of this neoplastic adipocyte into a physiologically functional and/or healthy cell and thus protect a subject/patient carrying this cell from a lipoma. In some cases, it may be preferable and/or satisfying and/or more practical to induce the conversion of the neoplastic adipocyte into a functional and/or healthy cell of a bone cell lineage. Once the treatment has been completed i.e. after the conversion of the neoplastic adipocyte into a non-neoplastic bone cell (e.g. an osteocyte) has taken place, surgical removal of the newly converted bone cells may be performed for e.g. aesthetic reasons and/or because of a discomfort and/or to avoid the possibility of e.g. infections, complications, etc. In other cases, it may be preferable and/or satisfying and/or more practical to induce the conversion of the neoplastic adipocyte into a functional and/or healthy cell of a muscle cell lineage. Because the conversion of the neoplastic adipocyte into a non-neoplastic muscle cell (e.g. a myocyte) does not yield hard tissues such as osteocytes, the patient would generally not feel any substantial discomfort and therefore, the surgical removal of the newly converted muscle cells may be avoided, although it may still be performed if the patient were to feel even the slight discomfort. The necessity of performing surgery following the presently defined recoding treatment would generally be left to the appreciation of the patient upon supervision of a medical practitioner.

[0454] The present disclosure thus provides methods to convert or recode a neoplastic cell of a specific tissue/cell type (e.g. bone, cartilage, neuron, prostate, ovary, muscle, skin, vascular, ligament, tendon, eye retina, kidney, head, neck, blood, gastrointestinal, lung and adipose tissues) into a non-neoplastic cell of any tissue/cell type (e.g. bone, cartilage, neuron, prostate, ovary, muscle, skin, vascular, ligament, tendon, eye retina and kidney).

[0455] Induction into a cell of a specific cell lineage

[0456] Bone Cell Lineage

[0457] Certain embodiments of the invention are particularly useful for inducing the conversion of a neoplastic cell into a cell (any cell) of a bone cell lineage.

[0458] In certain embodiments useful for inducing the conversion of a neoplastic cell into a cell (any cell) of a bone cell lineage, PEP1 is selected from the group consisting of SAIS, NAIS, SATS and SPIS.

[0459] In certain embodiments useful for inducing the conversion of a neoplastic cell into a cell (any cell) of a bone cell lineage, PEP3 is selected from the group consisting of VPT, APT, VPQ, VSQ and TQV.

[0460] In certain embodiments useful for inducing the conversion of a neoplastic cell into a cell (any cell) of a bone cell lineage, PEP5 is a peptide of general formula PEP3-AA¹¹-AA¹²; wherein PEP3 is selected from the group consisting of VPT, APT, VPQ, VSQ and TQV; wherein AA¹¹ is selected from the group consisting of E, K, Q, R, A, D, G and H, in particular E, K, Q, A and D; wherein AA¹² is selected from the group consisting of L, M, T, E, Q and H, in particular L. In one particular example, PEP5 is selected from the group consisting of VPTEL, APTKL, APTQL, VPTKL, VPQAL, VSQDL, VPQDL and TQVQL.

[0461] In certain embodiments useful for inducing the conversion of a neoplastic cell into a cell (any cell) of a bone cell lineage, PEP7 is an amino acid or a peptide with between two and seven amino acids of general formula AA¹-AA²-AA³-AA⁴-AA⁵-AA⁶-AA⁷; wherein AA¹, AA², AA³, AA⁴, and AA⁵ are independently absent or AA^{I} as defined herein; wherein AA⁶ is absent or selected from the group consisting of S, T, C, E, Q, P and R, preferably C, S, T or R; wherein AA⁷ is absent or is selected from the group consisting of S, T, C, E, Q, P and R, preferably is selected from the group consisting of C, S and P; and wherein at least one of AA¹, AA², AA³, AA⁴, AA⁵, AA⁶ or AA⁷ is not absent. In one particular example, PEP7 is selected from the group consisting of KIPKAXX, SIPKAXX, HVTKPTX, YVPKPXX, TVPKPXX, AVPKAXX, KVGKAXX, ASAAPXX, ASASPXX and RNVQXRP.

[0462] In certain embodiments useful for inducing the conversion of a neoplastic cell into a cell (any cell) of a bone cell lineage, PEP9 is a peptide of general formula AA¹-AA²-AA³-AA⁴-AA⁵-AA⁶-AA⁷-PEP5; wherein PEP5 is a peptide of formula PEP3-AA¹¹-AA¹²; wherein PEP3 is selected from the group consisting of VPT, APT, VPQ, VSQ and TQV; wherein AA¹¹ is selected from the group consisting of E, K, Q, R, A, D, G and H, in particular E, K, Q, A and D; wherein AA¹² is selected from the group consisting of L, M, T, E, Q and H, in particular L; wherein AA¹, AA², AA³, AA⁴, and AA⁵ are independently absent or AA^{I} as defined herein; wherein AA⁶ is absent or selected from the group consisting of S, T, C, E, Q, P and R, preferably C, S, T or R; wherein AA⁷ is selected from the group consisting of S, T, C, E, Q, P and R, preferably is selected from the group consisting of C, S and P. In one particular example, PEP9 is selected from the group consisting of KIPKAXXVPTEL, SIPKAXXVPTEL, HVTKPTXAPTKL, YVPKPXXAPTKL, TVPKPXXAPTQL, AVPKAXXAPTKL, KVGKAXXVPTKL, ASAAPXXVPQAL, ASASPXXVSQDL, ASASPXXVPQDL and RNVQXRPTQVQL.

[0463] In certain embodiments useful for inducing the conversion of a neoplastic cell into a cell (any cell) of a bone cell lineage, PEP12 is a peptide of general formula PEP1-AA¹⁷-PEP11; wherein AA¹⁷ is selected from the group consisting of G, A, V, L, I, P, F, M, W, T and S (in particular is selected from the group consisting of M, I, L, V and T); wherein PEP1 is selected from the group consisting of SAIS, NAIS, SATS and SPIS.

[0464] In certain embodiments useful for inducing the conversion of a neoplastic cell into a cell (any cell) of a bone cell lineage, PEP11 is a peptide with 3 amino acids of general formula AA¹⁸-AA¹⁹-AA²⁰; wherein AA¹⁸ is selected from the group consisting of L, V, Q, A and R, in particular is L; wherein AA¹⁹ is selected from the group consisting of F, W, H and Y (in particular is an aromatic, polar amino acid such as Y); wherein AA²⁰ is selected from the group consisting of L, F, Y, K, I, V and M, in particular is selected from the group consisting of L, F, Y, and K. In one particular example, PEP11 is selected from the group consisting of LYL, LYF, LYY and LYK.

[0465] In certain embodiments useful for inducing the conversion of a neoplastic cell into a cell (any cell) of a bone cell lineage, PEP1 is selected from the group consisting of SAIS, NAIS, SATS and SPIS; PEP11 is selected from the group consisting of LYL, LFF, LYF, LYY, LYK, LYI, LFI, LYV, VYY, QIM, AKV and RKI; and the pair PEP1:PEP11 is selected from the group consisting of SAIS:LYL, NAIS:LYF, SATS:LYY and SPIS:LYK.

[0466] The definitions of “PEP” pairs and triplets e.g. PEP3:PEP1, PEP5:PEP12, or PEP7:PEP5:PEP1, most particularly useful for inducing the conversion of a neoplastic cell into a cell (any cell) of a bone cell lineage, are as already defined herein to the extent that PEP1, PEP3, PEP5, PEP7, PEP9, PEP11 and PEP12 are particularly useful for these applications as defined in the present bone section.

[0467] In certain embodiments useful for inducing the conversion of a neoplastic cell into a cell (any cell) of a bone cell lineage, said GFR-binding compound is a synthetic molecule as defined herein in the definition section.

[0468] In certain embodiments useful for inducing the conversion of a neoplastic cell into a cell (any cell) of a bone cell lineage, said GFR-binding compound is a synthetic peptide, or a variant or analog thereof, or a peptidomimetic.

[0469] Chondrocytic cell lineage Certain embodiments of the invention are particularly useful for inducing the conversion of a neoplastic cell into a cell (any cell) of a chondrocytic cell lineage.

[0470] In certain embodiments useful for inducing the conversion of a neoplastic cell into a cell (any cell) of a chondrocytic cell lineage, PEP1 is selected from the group consisting of SAIS, NAIS, SPIS, EPLP and EPLT.

[0471] In certain embodiments useful for inducing the conversion of a neoplastic cell into a cell (any cell) of a chondrocytic cell lineage, PEP3 is selected from the group consisting of VPT, APT, VPQ and VSQ.

[0472] In certain embodiments useful for inducing the conversion of a neoplastic cell into a cell (any cell) of a chondrocytic cell lineage, PEP5 is a peptide of general formula PEP3-AA¹¹-AA¹²; wherein PEP3 is selected from the group consisting of VPT, APT, VPQ and VSQ; wherein AA¹¹ is selected from the group consisting of E, K, Q, R, A, D, G and H, in particular E, K, Q, R, A and D; wherein AA¹² is selected from the group consisting of L, M, T, E, Q and H, in particular is L. In one particular example, PEP5 is selected from the group consisting of VPTEL, APTKL, APTQL, VPTRL, VPQAL, VSQDL and VPQDL.

[0473] In certain embodiments useful for inducing the conversion of a neoplastic cell into a cell (any cell) of a chondrocytic cell lineage, PEP7 is an amino acid or a peptide with between two and seven amino acids of general formula AA¹-AA²-AA³-AA⁴-AA⁵-AA⁶-AA⁷; wherein AA¹, AA², AA³, AA⁴, and AA⁵ are independently absent or AA^{I} as defined herein; wherein AA⁶ is absent or selected from the group consisting of S, T, C, E, Q, P and R, preferably is S, C or T; wherein AA⁷ is absent or is selected from the group consisting of S, T, C, E, Q, P and R, preferably is S or C; and wherein at least one of AA¹, AA², AA³, AA⁴, AA⁵, AA⁶ or AA⁷ is not absent. In one particular example, PEP7 is selected from the group consisting of KIPKAXX, SIPKAXX, HVTKPTX, YVPKPXX, TVPKPXX, STPPTXX, ASAAPXX and ASASPXX.

[0474] In certain embodiments useful for inducing the conversion of a neoplastic cell into a cell (any cell) of a chondrocytic cell lineage, PEP9 is a peptide of general formula AA¹-AA²-AA³-AA⁴-AA⁵-AA⁶-AA⁷-PEP5; wherein PEP5 is a peptide of formula PEP3-AA¹¹-AA¹²; wherein PEP3 is selected from the group consisting of VPT, APT, VPQ and VSQ; wherein AA¹ is selected from the group consisting of E, K, Q, R, A, D, G and H, in particular E, K, Q, R, A and D; wherein AA¹² is selected from the group consisting of L, M, T, E, Q and H, in particular is L; wherein AA¹, AA², AA³, AA⁴, and AA⁵ are independently absent or AA^{I} as defined herein; wherein AA⁶ is absent or selected from the group consisting of S, T, C, E, Q, P and R, preferably is S, C or T; wherein AA⁷ is selected from the group consisting of S, T, C, E, Q, P and R, preferably is S or C. In one particular example, PEP9 is selected from the group consisting of KIPKAXXVPTEL, SIPKAXXVPTEL, HVTKPTXAPTKL, YVPKPXXAPTKL, TVPKPXXAPTQL, STPPTXXVPTRL, ASAAPXXVPQAL, ASASPXXVSQDL and ASASPXXVPQDL.

[0475] In certain embodiments useful for inducing the conversion of a neoplastic cell into a cell (any cell) of a chondrocytic cell lineage, PEP12 is a peptide of general formula PEP1-AA¹⁷-PEP11; wherein AA¹⁷ is selected from the group consisting of G, A, V, L, I, P, F, M, W, T and S (in particular is selected from the group consisting of M, I, L, V and T); wherein PEP1 is selected from the group consisting of SAIS, NAIS, SPIS, EPLP and EPLT.

[0476] In certain embodiments useful for inducing the conversion of a neoplastic cell into a cell (any cell) of a chondrocytic cell lineage, PEP11 is a peptide with 3 amino acids of general formula AA¹⁸-AA¹⁹-AA²⁰; wherein AA¹⁸ is selected from the group consisting of L, V, Q, A and R, in particular is L or V; wherein AA¹⁹ is selected from the group consisting of F, W, H and Y, in particular is Y or F; wherein AA²⁰ is selected from the group consisting of L, F, Y and I. In one particular example, PEP11 is selected from the group consisting of LYL, LYF, LFI, VYY and LYY.

[0477] In certain embodiments useful for inducing the conversion of a neoplastic cell into a cell (any cell) of a chondrocytic cell lineage, PEP1 is selected from the group consisting of SAIS, NAIS, SPIS, EPLP and EPLT; PEP11 is selected from the group consisting of LYL, LYF, LFI, VYY and LYY; and the pair PEP1:PEP11 is selected from the group consisting of SAIS:LYL, NAIS:LYF, SPIS:LFI, EPLP:VYY and EPLT:LYY.

[0478] The definitions of “PEP” pairs and triplets e.g. PEP3:PEP1, PEP5:PEP12, or PEP7:PEP5:PEP1, most particularly useful for inducing the conversion of a neoplastic cell into a cell (any cell) of a chondrocytic cell lineage, are as already defined herein to the extent that PEP1, PEP3, PEP5, PEP7, PEP9, PEP11 and PEP12 are particularly useful for these applications as defined in the present cartilage section.

[0479] In certain embodiments useful for inducing the conversion of a neoplastic cell into a cell (any cell) of a chondrocytic cell lineage, said GFR-binding compound is a synthetic molecule as defined herein in the definition section.

[0480] In certain embodiments useful for inducing the conversion of a neoplastic cell into a cell (any cell) of a chondrocytic cell lineage, said GFR-binding compound is a synthetic peptide, or a variant or analog thereof, or a peptidomimetic.

[0481] Vascular Cell Lineage

[0482] Certain embodiments of the invention are particularly useful for inducing the conversion of a neoplastic cell into a cell (any cell) of a vascular cell lineage.

[0483] In other embodiments useful for inducing the conversion of a neoplastic cell into a cell (any cell) of a vascular cell lineage, PEP1 is selected from the group consisting of SNIT, RPVQ and RSVK.

[0484] In other embodiments useful for inducing the conversion of a neoplastic cell into a cell (any cell) of a vascular cell lineage, PEP3 is selected from the group consisting of VPT, SRV and TQV.

[0485] In other embodiments useful for inducing the conversion of a neoplastic cell into a cell (any cell) of a vascular cell lineage, PEP5 is a peptide of general formula PEP3-AA¹¹-AA¹²; wherein PEP3 is selected from the group consisting of VPT, SRV and TQV; wherein AA¹¹ is selected from the group consisting of E, K, Q, R, A, D, G and H, in particular is E, G, H and Q; wherein AA¹² is selected from the group consisting of L, M, T, E, Q and H, in particular is selected from the group consisting of E, Q, H and L. In one particular example, PEP5 is selected from the group consisting of VPTGQ, VPTEE, SRVHH and TQVQL.

[0486] In other embodiments useful for inducing the conversion of a neoplastic cell into a cell (any cell) of a vascular cell lineage, PEP7 is an amino acid or a peptide with between two and seven amino acids of general formula AA¹-AA²-AA³-AA⁴-AA⁵-AA⁶-AA⁷; wherein AA¹, AA², AA³, AA⁴, and AA⁵ are independently absent or AA^{I} as defined herein; wherein AA⁶ is absent or selected from the group consisting of S, T, C, E, Q, P and R, preferably is selected from the group consisting of E, Q and R; wherein AA⁷ is absent or is selected from the group consisting of S, T, C, E, Q, P and R, preferably is selected from the group consisting of S, C and P; and wherein at least one of AA¹, AA², AA³, AA⁴, AA⁵, AA⁶ or AA⁷ is not absent. In one particular example, PEP7 is selected from the group consisting of NDEGLEX, SSVKXQP and RNVQXRP.

[0487] In other embodiments useful for inducing the conversion of a neoplastic cell into a cell (any cell) of a vascular cell lineage, PEP9 is a peptide of general formula AA¹-AA²-AA³-AA⁴-AA⁵-AA⁶-AA⁷-PEP5; wherein PEP5 is a peptide of formula PEP3-AA¹¹-AA¹²; wherein PEP3 is selected from the group consisting of VPT, SRV and TQV; wherein AA¹ is selected from the group consisting of E, K, Q, R, A, D, G and H, in particular is E, G, H and Q; wherein AA¹² is selected from the group consisting of L, M, T, E, Q and H, in particular is selected from the group consisting of E, Q, H and L; wherein AA¹, AA², AA³, AA⁴, and AA⁵ are independently absent or AA^{I} as defined herein; wherein AA⁶ is absent or selected from the group consisting of S, T, C, E, Q, P and R, preferably is selected from the group consisting of E, Q and R; wherein AA⁷ is selected from the group consisting of S, T, C, E, Q, P and R, preferably is selected from the group consisting of S, C and P. In one particular example, PEP9 is selected from the group consisting of NDEGLEXVPTEE, NDEGLEXVPTGQ, SSVKXQPSRVHH and RNVQXRPTQVQL.

[0488] In other embodiments useful for inducing the conversion of a neoplastic cell into a cell (any cell) of a vascular cell lineage, PEP12 is a peptide of general formula PEP1-AA¹⁷-PEP11; wherein AA¹⁷ is selected from the group consisting of G, A, V, L, I, P, F, M, W, T and S (in particular is selected from the group consisting of M, I, L, V and T); wherein PEP1 is selected from the group consisting of SNIT, RPVQ and RSVK.

[0489] In other embodiments useful for inducing the conversion of a neoplastic cell into a cell (any cell) of a vascular cell lineage, PEP11 is a peptide with 3 amino acids of general formula AA¹⁸-AA¹⁹-AA²⁰; wherein AA¹⁸ is selected from the group consisting of L, V, Q, A and R, in particular is selected from the group consisting of Q, A and R; wherein AA¹⁹ is selected from the group consisting of F, W, H, Y, I and K, in particular is I or K; wherein AA²⁰ is selected from the group consisting of L, F, Y, K, I, V and M, in particular is selected from the group consisting of M, V and I. In one particular example, PEP11 is selected from the group consisting of QIM, AKV and RKI.

[0490] In other embodiments useful for inducing the conversion of a neoplastic cell into a cell (any cell) of a vascular cell lineage, PEP1 is selected from the group consisting of SNIT, RPVQ and RSVK; PEP11 is selected from the group consisting of QIM, AKV and RKI; and the pair PEP1:PEP11 is selected from the group consisting of SNIT:QIM, RSVK:KEVQV and RPVQ:KKATV.

[0491] The definitions of “PEP” pairs and triplets e.g. PEP3:PEP1, PEP5:PEP12, or PEP7:PEP5:PEP1, most particularly useful for inducing the conversion of a neoplastic cell into a cell (any cell) of a vascular cell lineage, are as already defined herein to the extent that PEP1, PEP3, PEP5, PEP7, PEP9, PEP11 and PEP12 are particularly useful for these applications as defined in the present vascular tissue section.

[0492] In other embodiments useful for inducing the conversion of a neoplastic cell into a cell (any cell) of a vascular cell lineage, said GFR-binding compound is a synthetic molecule as defined herein in the definition section.

[0493] In other embodiments useful for inducing the conversion of a neoplastic cell into a cell (any cell) of a vascular cell lineage, said GFR-binding compound is a synthetic peptide, or a variant or analog thereof, or a peptidomimetic.

[0494] Neuron Lineage

[0495] Certain embodiments of the invention are particularly useful for inducing the conversion of a neoplastic cell into a cell (any cell) of a neuron lineage.

[0496] In certain embodiments useful for inducing the conversion of a neoplastic cell into a cell (any cell) of a neuron lineage, PEP1 is selected from the group consisting of NAIS, SPIS and EPIS.

[0497] In certain embodiments useful for inducing the conversion of a neoplastic cell into a cell (any cell) of a neuron lineage, PEP3 is selected from the group consisting of VPT, APT, VPA, VPQ and VSQ.

[0498] In certain embodiments useful for inducing the conversion of a neoplastic cell into a cell (any cell) of a neuron lineage, PEP5 is a peptide of general formula PEP3-AA¹¹-AA¹²; wherein PEP3 is selected from the group consisting of VPT, APT, VPA, VPQ and VSQ; wherein AA¹¹ is selected from the group consisting of E, K, Q, R, A, D, G and H, in particular E, K, Q, R, A and D; wherein AA¹² is selected from the group consisting of L, M, T, E, Q and H, in particular L. In one particular example, PEP5 is selected from the group consisting of VPTEL, APTKL, APTQL, VPTKL, VPARL, VPQAL, VSQDL and VPQDL.

[0499] In certain embodiments useful for inducing the conversion of a neoplastic cell into a cell (any cell) of a neuron lineage, PEP7 is an amino acid or a peptide with between two and seven amino acids of general formula AA¹-AA²-AA³-AA⁴-AA⁵-AA⁶-AA⁷; wherein AA¹, AA², AA³, AA⁴, and AA⁵ are independently absent or AA^{I} as defined herein; wherein AA⁶ is absent or selected from the group consisting of S, T, C, E, Q, P and R, preferably S or C; wherein AA⁷ is absent or is selected from the group consisting of S, T, C, E, Q, P and R, preferably is S or C; and wherein at least one of AA¹, AA², AA³, AA⁴, AA⁵, AA⁶ or AA⁷ is not absent. In one particular example, PEP7 is selected from the group consisting of KIPKAXX, SIPKAXX, HVTKPTX, YVPKPXX, TVPKPXX, AVPKAXX, KVGKAXX, ASAAPXX, ASASPXX and RNVQXRP.

[0500] In certain embodiments useful for inducing the conversion of a neoplastic cell into a cell (any cell) of a neuron lineage, PEP9 is a peptide of general formula AA¹-AA²-AA³-AA⁴-AA⁵-AA⁶-AA⁷-PEP5; wherein PEP5 is a peptide of formula PEP3-AA¹¹-AA¹²; wherein PEP3 is selected from the group consisting of VPT, APT, VPA, VPQ and VSQ; wherein AA¹ is selected from the group consisting of E, K, Q, R, A, D, G and H, in particular E, K, Q, R, A and D; wherein AA¹² is selected from the group consisting of L, M, T, E, Q and H, in particular L; wherein AA¹, AA², AA³, AA⁴, and AA⁵ are independently absent or AA^{I} as defined herein; wherein AA⁶ is absent or selected from the group consisting of S, T, C, E, Q, P and R, preferably S or C; wherein AA⁷ is selected from the group consisting of S, T, C, E, Q, P and R, preferably is S or C.

[0501] In one particular example, PEP9 is selected from the group consisting of KIPKAXXVPTEL, SIPKAXXVPTEL, HVTKPTXAPTKL, YVPKPXXAPTKL, TVPKPXXAPTQL, AVPKAXXAPTKL, KVGKAXXVPTKL, ASAAPXXVPQAL, ASASPXXVSQDL, ASASPXXVPQDL and RNVQXRPTQVQL.

[0502] In certain embodiments useful for inducing the conversion of a neoplastic cell into a cell (any cell) of a neuron lineage, PEP12 is a peptide of general formula PEP1-AA¹⁷-PEP11; wherein AA¹⁷ is selected from the group consisting of G, A, V, L, I, P, F, M, W, T and S (in particular is selected from the group consisting of M, I, L, V and T); wherein PEP1 is selected from the group consisting of NAIS, SPIS and EPIS.

[0503] In certain embodiments useful for inducing the conversion of a neoplastic cell into a cell (any cell) of a neuron lineage, PEP11 is a peptide with 3 amino acids of general formula AA¹⁸-AA¹⁹-AA²⁰; wherein AA¹⁸ is selected from the group consisting of L, V, Q, A and R, in particular is L; wherein AA¹⁹ is selected from the group consisting of F, W, H and Y (in particular is an aromatic, polar amino acid such as Y); wherein AA²⁰ is selected from the group consisting of L, F, Y, K, I, V and M, in particular is selected from the group consisting of L, F, I, and K. In one particular example, PEP11 is selected from the group consisting of LYL, LYF, LYI and LYK.

[0504] In certain embodiments useful for inducing the conversion of a neoplastic cell into a cell (any cell) of a neuron lineage, PEP1 is selected from the group consisting of NAIS, SPIS and EPIS; PEP11 is selected from the group consisting of LYF, LYK, LYL and LYI; and the pair PEP1:PEP11 is selected from the group consisting of NAIS:LYF, SPIS:LYK, EPIS:LYL and SPIS:LYI.

[0505] The definitions of “PEP” pairs and triplets e.g. PEP3:PEP1, PEP5:PEP12, or PEP7:PEP5:PEP1, most particularly useful for inducing the conversion of a neoplastic cell into a cell (any cell) of a neuron lineage, are as already defined herein to the extent that PEP1, PEP3, PEP5, PEP7, PEP9, PEP11 and PEP12 are particularly useful for these applications as defined in the present section.

[0506] In certain embodiments useful for inducing the conversion of a neoplastic cell into a cell (any cell) of a neuron lineage, said GFR-binding compound is a synthetic molecule as defined herein in the definition section.

[0507] In certain embodiments useful for inducing the conversion of a neoplastic cell into a cell (any cell) of a neuron lineage, said GFR-binding compound is a synthetic peptide, or a variant or analog thereof, or a peptidomimetic.

[0508] Eye Retina Cell Lineage

[0509] Certain embodiments of the invention are particularly useful for inducing the conversion of a neoplastic cell into a cell (any cell) of an eye retina cell lineage.

[0510] In certain embodiments useful for inducing the conversion of a neoplastic cell into a cell (any cell) of an eye retina cell lineage, PEP1 is SPIN.

[0511] In certain embodiments useful for inducing the conversion of a neoplastic cell into a cell (any cell) of an eye retina cell lineage, PEP3 is selected from the group consisting of VPT, APT, TPT, VPA and APV.

[0512] In certain embodiments useful for inducing the conversion of a neoplastic cell into a cell (any cell) of an eye retina cell lineage, PEP5 is a peptide of general formula PEP3-AA¹¹-AA¹²; wherein PEP3 is selected from the group consisting of VPT, APT, TPT, VPA and APV; wherein AA¹¹ is selected from the group consisting of E, K, Q, R, A, D, G and H, in particular is E, K, Q and R; wherein AA¹² is selected from the group consisting of L, M, T, E, Q and H, in particular is L, M or T. In one particular example, PEP5 is selected from the group consisting of VPTEL, APTKL, APTQL, VPTKL, TPTKM, VPARL, VPTRL and APVKT.

[0513] In certain embodiments useful for inducing the conversion of a neoplastic cell into a cell (any cell) of an eye retina cell lineage, PEP7 is an amino acid or a peptide with between two and seven amino acids of general formula AA¹-AA²-AA³-AA⁴-AA⁵-AA⁶-AA⁷; wherein AA¹, AA², AA³, AA⁴, and AA⁵ are independently absent or AA^{I} as defined herein; wherein AA⁶ is absent or selected from the group consisting of S, T, C, E, Q, P and R, preferably is S or C; wherein AA⁷ is absent or is selected from the group consisting of S, T, C, E, Q, P and R, preferably is S or C; and wherein at least one of AA¹, AA², AA³, AA⁴, AA⁵, AA⁶ or AA⁷ is not absent. In one particular example, PEP7 is selected from the group consisting of KIPKAXX, SIPKAXX, HVTKPTX, YVPKPXX, TVPKPXX, AVPKAXX, KVGKAXX, KASKAXX, GSAGPXX, AAPAXXS, STPPTXX, HVPKPXX and RVPSTXX.

[0514] In certain embodiments useful for inducing the conversion of a neoplastic cell into a cell (any cell) of an eye retina cell lineage, PEP9 is a peptide of general formula AA¹-AA²-AA³-AA⁴-AA⁵-AA⁶-AA⁷-PEP5; wherein PEP5 is a peptide of formula PEP3-AA¹¹-AA¹²; wherein PEP3 is selected from the group consisting of VPT, APT, TPT, VPA and APV; wherein AA¹¹ is selected from the group consisting of E, K, Q, R, A, D, G and H, in particular is E, K, Q and R; wherein AA¹² is selected from the group consisting of L, M, T, E, Q and H, in particular is L, M or T; wherein AA¹, AA², AA³, AA⁴, and AA⁵ are independently absent or AA^{I} as defined herein; wherein AA⁶ is absent or selected from the group consisting of S, T, C, E, Q, P and R, preferably is S or C; wherein AA⁷ is selected from the group consisting of S, T, C, E, Q, P and R, preferably is S or C. In one particular example, PEP9 is selected from the group consisting of KIPKAXXVPTEL, SIPKAXXVPTEL, HVTKPTXAPTKL, YVPKPXXAPTKL, TVPKPXXAPTQL, AVPKAXXAPTKL, KVGKAXXVPTKL, KASKAXXVPTKL, GSAGPXXTPTKL, AAPASXXVPARL, STPPTXXVPTRL, HVPKPXXAPTKL and RVPSTXXAPVKT.

[0515] In certain embodiments useful for inducing the conversion of a neoplastic cell into a cell (any cell) of an eye retina cell lineage, PEP12 is a peptide of general formula PEP1-AA¹⁷-PEP11; wherein AA¹⁷ is selected from the group consisting of G, A, V, L, I, P, F, M, W, T and S (in particular is selected from the group consisting of M, I, L, V and T); wherein PEP1 is SPIN.

[0516] In certain embodiments useful for inducing the conversion of a neoplastic cell into a cell (any cell) of an eye retina cell lineage, PEP11 is a peptide with 3 amino acids of general formula AA¹⁸-AA¹⁹-AA²⁰; wherein AA¹⁸ is selected from the group consisting of L, V, Q, A and R, in particular is L; wherein AA¹⁹ is selected from the group consisting of F, W, H and Y, in particular is Y or F; wherein AA²⁰ is selected from the group consisting of L, F, Y, K, I, V and M, in particular is selected from the group consisting of L, F, Y, K, I and V. In one particular example, PEP11 is LYF.

[0517] In certain embodiments useful for inducing the conversion of a neoplastic cell into a cell (any cell) of an eye retina cell lineage, PEP1 is SPIN and PEP11 is LYF.

[0518] The definitions of “PEP” pairs and triplets e.g. PEP3:PEP1, PEP5:PEP12, or PEP7:PEP5:PEP1, most particularly useful for inducing the conversion of a neoplastic cell into a cell (any cell) of an eye retina cell lineage, are as already defined herein to the extent that PEP1, PEP3, PEP5, PEP7, PEP9, PEP11 and PEP12 are particularly useful for these applications as defined in the present eye retina section.

[0519] In certain embodiments useful for inducing the conversion of a neoplastic cell into a cell (any cell) of an eye retina cell lineage, said GFR-binding compound is a synthetic molecule as defined herein in the definition section.

[0520] In certain embodiments useful for inducing the conversion of a neoplastic cell into a cell (any cell) of an eye retina cell lineage, said GFR-binding compound is a synthetic peptide, or a variant or analog thereof, or a peptidomimetic.

[0521] Renal Cell Lineage

[0522] Certain embodiments of the invention are particularly useful for inducing the conversion of a neoplastic cell into a cell (any cell) of a renal cell lineage.

[0523] In certain embodiments useful for inducing the conversion of a neoplastic cell into a cell (any cell) of a renal cell lineage, PEP1 is SPIN.

[0524] In certain embodiments useful for inducing the conversion of a neoplastic cell into a cell (any cell) of a renal cell lineage, PEP3 is selected from the group consisting of VPT, APT, TPT, VPA and APV.

[0525] In certain embodiments useful for inducing the conversion of a neoplastic cell into a cell (any cell) of a renal cell lineage, PEP5 is a peptide of general formula PEP3-AA¹¹-AA¹²; wherein PEP3 is selected from the group consisting of VPT, APT, TPT, VPA and APV; wherein AA¹¹ is selected from the group consisting of E, K, Q, R, A, D, G and H, in particular is E, K, Q and R; wherein AA¹² is selected from the group consisting of L, M, T, E, Q and H, in particular is L, M or T. In one particular example, PEP5 is selected from the group consisting of VPTEL, APTKL, APTQL, VPTKL, TPTKM, VPARL, VPTRL and APVKT.

[0526] In certain embodiments useful for inducing the conversion of a neoplastic cell into a cell (any cell) of a renal cell lineage, PEP7 is an amino acid or a peptide with between two and seven amino acids of general formula AA¹-AA²-AA³-AA⁴-AA⁵-AA⁶-AA⁷; wherein AA¹, AA², AA³, AA⁴, and AA⁵ are independently absent or AA^{I} as defined herein; wherein AA⁶ is absent or selected from the group consisting of S, T, C, E, Q, P and R, preferably is S or C; wherein AA⁷ is absent or is selected from the group consisting of S, T, C, E, Q, P and R, preferably is S or C; and wherein at least one of AA¹, AA², AA³, AA⁴, AA⁵, AA⁶ or AA⁷ is not absent. In one particular example, PEP7 is selected from the group consisting of KIPKAXX, SIPKAXX, HVTKPTX, YVPKPXX, TVPKPXX, AVPKAXX, KVGKAXX, KASKAXX, GSAGPXX, AAPAXXS, STPPTXX, HVPKPXX and RVPSTXX.

[0527] In certain embodiments useful for inducing the conversion of a neoplastic cell into a cell (any cell) of a renal cell lineage, PEP9 is a peptide of general formula AA¹-AA²-AA³-AA⁴-AA⁵-AA⁶-AA⁷-PEP5; wherein PEP5 is a peptide of formula PEP3-AA¹¹-AA¹²; wherein PEP3 is selected from the group consisting of VPT, APT, TPT, VPA and APV; wherein AA¹ is selected from the group consisting of E, K, Q, R, A, D, G and H, in particular is E, K, Q and R; wherein AA¹² is selected from the group consisting of L, M, T, E, Q and H, in particular is L, M or T; wherein AA¹, AA², AA³, AA⁴, and AA⁵ are independently absent or AA^{I} as defined herein; wherein AA⁶ is absent or selected from the group consisting of S, T, C, E, Q, P and R, preferably is S or C; wherein AA⁷ is selected from the group consisting of S, T, C, E, Q, P and R, preferably is S or C. In one particular example, PEP9 is selected from the group consisting of KIPKAXXVPTEL, SIPKAXXVPTEL, HVTKPTXAPTKL, YVPKPXXAPTKL, TVPKPXXAPTQL, AVPKAXXAPTKL, KVGKAXXVPTKL, KASKAXXVPTKL, GSAGPXXTPTKL, AAPASXXVPARL, STPPTXXVPTRL, HVPKPXXAPTKL and RVPSTXXAPVKT.

[0528] In certain embodiments useful for inducing the conversion of a neoplastic cell into a cell (any cell) of a renal cell lineage, PEP12 is a peptide of general formula PEP1-AA¹⁷-PEP11; wherein AA¹⁷ is selected from the group consisting of G, A, V, L, I, P, F, M, W, T and S (in particular is selected from the group consisting of M, I, L, V and T); wherein PEP1 is SPIN.

[0529] In certain embodiments useful for inducing the conversion of a neoplastic cell into a cell (any cell) of a renal cell lineage, PEP11 is a peptide with 3 amino acids of general formula AA¹⁸-AA¹⁹-AA²⁰; wherein AA¹⁸ is selected from the group consisting of L, V, Q, A and R, in particular is L; wherein AA¹⁹ is selected from the group consisting of F, W, H and Y, in particular is Y or F; wherein AA²⁰ is selected from the group consisting of L, F, Y, K, I, V and M, in particular is selected from the group consisting of L, F, Y, K, I and V. In one particular example, PEP11 is LYF.

[0530] In certain embodiments useful for inducing the conversion of a neoplastic cell into a cell (any cell) of a renal cell lineage, PEP1 is SPIN and PEP11 is LYF.

[0531] The definitions of “PEP” pairs and triplets e.g. PEP3:PEP1, PEP5:PEP12, or PEP7:PEP5:PEP1, most particularly useful for inducing the conversion of a neoplastic cell into a cell (any cell) of a renal cell lineage, are as already defined herein to the extent that PEP1, PEP3, PEP5, PEP7, PEP9, PEP11 and PEP12 are particularly useful for these applications as defined in the present renal tissue section.

[0532] In certain embodiments useful for inducing the conversion of a neoplastic cell into a cell (any cell) of a renal cell lineage, said GFR-binding compound is a synthetic molecule as defined herein in the definition section.

[0533] In certain embodiments useful for inducing the conversion of a neoplastic cell into a cell (any cell) of a renal cell lineage, said GFR-binding compound is a synthetic peptide, or a variant or analog thereof, or a peptidomimetic.

[0534] Ligament and Tendon Cell Lineage

[0535] Certain embodiments of the invention are particularly useful for inducing the conversion of a neoplastic cell into a cell (any cell) of the ligament and tendon cell lineage.

[0536] In certain embodiments useful for inducing the conversion of a neoplastic cell into a cell (any cell) of the ligament and tendon cell lineage, PEP1 is selected from the group consisting of NAIS, SPIS, EPLP and EPLT.

[0537] In certain embodiments useful for inducing the conversion of a neoplastic cell into a cell (any cell) of the ligament and tendon cell lineage, PEP3 is selected from the group consisting of VPT, APT, VPQ and VSQ.

[0538] In certain embodiments useful for inducing the conversion of a neoplastic cell into a cell (any cell) of the ligament and tendon cell lineage, PEP5 is a peptide of general formula PEP3-AA¹¹-AA¹²; wherein PEP3 is selected from the group consisting of VPT, APT, VPQ and VSQ; wherein AA¹¹ is selected from the group consisting of E, K, Q, R, A, D, G and H, in particular is E, K, Q, R, A and D; wherein AA¹² is selected from the group consisting of L, M, T, E, Q and H, in particular is L. In one particular example, PEP5 is selected from the group consisting of VPTEL, APTKL, APTQL, VPTRL, VPQAL, VSQDL and VPQDL.

[0539] In certain embodiments useful for inducing the conversion of a neoplastic cell into a cell (any cell) of the ligament and tendon cell lineage, PEP7 is an amino acid or a peptide with between two and seven amino acids of general formula AA¹-AA²-AA³-AA⁴-AA⁵-AA⁶-AA⁷; wherein AA¹, AA², AA³, AA⁴, and AA⁵ are independently absent or AA^{I} as defined herein; wherein AA⁶ is absent or selected from the group consisting of S, T, C, E, Q, P and R, preferably is selected from the group consisting of T, S and C; wherein AA⁷ is absent or is selected from the group consisting of S, T, C, E, Q, P and R, preferably S or C; and wherein at least one of AA¹, AA², AA³, AA⁴, AA⁵, AA⁶ or AA⁷ is not absent. In one particular example, PEP7 is selected from the group consisting of KIPKAXX, SIPKAXX, HVTKPTX, YVPKPXX, TVPKPXX, STPPTXX, ASAAPXX and ASASPXX.

[0540] In certain embodiments useful for inducing the conversion of a neoplastic cell into a cell (any cell) of the ligament and tendon cell lineage, PEP9 is a peptide of general formula AA¹-AA²-AA³-AA⁴-AA⁵-AA⁶-AA⁷-PEP5; wherein PEP5 is a peptide of formula PEP3-AA¹⁷-AA¹²; wherein PEP3 is selected from the group consisting of VPT, APT, VPQ and VSQ; wherein AA¹¹ is selected from the group consisting of E, K, Q, R, A, D, G and H, in particular is E, K, Q, R, A and D; wherein AA¹² is selected from the group consisting of L, M, T, E, Q and H, in particular is L; wherein AA¹, AA², AA³, AA⁴, and AA⁵ are independently absent or AA^{I} as defined herein; wherein AA⁶ is absent or selected from the group consisting of S, T, C, E, Q, P and R, preferably is selected from the group consisting of T, S and C; wherein AA⁷ is selected from the group consisting of S, T, C, E, Q, P and R, preferably S or C. In one particular example, PEP9 is selected from the group consisting of KIPKAXXVPTEL, SIPKAXXVPTEL, HVTKPTXAPTKL, YVPKPXXAPTKL, TVPKPXXAPTQL, STPPTXXVPTRL, ASAAPXXVPQAL, ASASPXXVSQDL and ASASPXXVPQDL.

[0541] In certain embodiments useful for inducing the conversion of a neoplastic cell into a cell (any cell) of the ligament and tendon cell lineage, PEP12 is a peptide of general formula PEP1-AA¹⁷-PEP11; wherein AA¹⁷ is selected from the group consisting of G, A, V, L, I, P, F, M, W, T and S (in particular is selected from the group consisting of M, I, L, V and T); wherein PEP1 is selected from the group consisting of NAIS, SPIS, EPLP and EPLT.

[0542] In certain embodiments useful for inducing the conversion of a neoplastic cell into a cell (any cell) of the ligament and tendon cell lineage, PEP11 is a peptide with 3 amino acids of general formula AA¹⁸-AA¹⁹-AA²⁰; wherein AA¹⁸ is selected from the group consisting of L, V, Q, A and R, in particular is L or V; wherein AA¹⁹ is selected from the group consisting of F, W, H and Y, in particular is Y or F; wherein AA²⁰ is selected from the group consisting of L, F, Y, K, I, V and M, in particular is selected from the group consisting of F, I and Y. In one particular example, PEP11 is selected from the group consisting of LYF, LFI, VYY and LYY.

[0543] In certain embodiments useful for inducing the conversion of a neoplastic cell into a cell (any cell) of the ligament and tendon cell lineage, PEP1 is selected from the group consisting of NAIS, SPIS, EPLP and EPLT; PEP11 is selected from the group consisting of LYF, LFI, VYY and LYY; and the pair PEP1:PEP11 is selected from the group consisting of NAIS:LYF, SPIS:LFI, EPLP:VYY and EPLT:LYY.

[0544] The definitions of “PEP” pairs and triplets e.g. PEP3:PEP1, PEP5:PEP12, or PEP7:PEP5:PEP1, most particularly useful for inducing the conversion of a neoplastic cell into a cell (any cell) of the ligament and tendon cell lineage, are as already defined herein to the extent that PEP1, PEP3, PEP5, PEP7, PEP9, PEP11 and PEP12 are particularly useful for these applications as defined in the present L/T section.

[0545] In certain embodiments useful for inducing the conversion of a neoplastic cell into a cell (any cell) of the ligament and tendon cell lineage, said GFR-binding compound is a synthetic molecule as defined herein in the definition section.

[0546] In certain embodiments useful for inducing the conversion of a neoplastic cell into a cell (any cell) of the ligament and tendon cell lineage, said GFR-binding compound is a synthetic peptide, or a variant or analog thereof, or a peptidomimetic.

[0547] In other embodiments also useful for inducing the conversion of a neoplastic cell into a cell (any cell) of the ligament and tendon cell lineage, PEP1 is SPIS.

[0548] In other embodiments also useful for inducing the conversion of a neoplastic cell into a cell (any cell) of the ligament and tendon cell lineage, PEP3 is selected from the group consisting of VPT, APT, TPT, VPA and APV.

[0549] In other embodiments also useful for inducing the conversion of a neoplastic cell into a cell (any cell) of the ligament and tendon cell lineage, PEP5 is a peptide of general formula PEP3-AA¹¹-AA¹²; wherein PEP3 is selected from the group consisting of VPT, APT, TPT, VPA and APV; wherein AA¹ is selected from the group consisting of E, K, Q, R, A, D, G and H, in particular is selected from the group consisting of E, K, Q and R; wherein AA¹² is selected from the group consisting of L, M, T, E, Q and H, in particular is selected from the group consisting of L, M and T. In one particular example, PEP5 is selected from the group consisting of VPTEL, APTKL, APTQL, VPTKL, TPTKM, VPARL, VPTRL and APVKT.

[0550] In other embodiments also useful for inducing the conversion of a neoplastic cell into a cell (any cell) of the ligament and tendon cell lineage, PEP7 is an amino acid or a peptide with between two and seven amino acids of general formula AA¹-AA²-AA³-AA⁴-AA⁵-AA⁶-AA⁷; wherein AA¹, AA², AA³, AA⁴, and AA⁵ are independently absent or AA^{I} as defined herein; wherein AA⁶ is absent or selected from the group consisting of S, T, C, E, Q, P and R, preferably is S or C; wherein AA⁷ is absent or is selected from the group consisting of S, T, C, E, Q, P and R, preferably is S or C; and wherein at least one of AA¹, AA², AA³, AA⁴, AA⁵, AA⁶ or AA⁷ is not absent. In one particular example, PEP7 is selected from the group consisting of KIPKAXX, SIPKAXX, HVTKPTX, YVPKPXX, TVPKPXX, AVPKAXX, KVGKAXX, KASKAXX, GSAGPXX, AAPAXXS, STPPTXX, HVPKPXX and RVPSTXX.

[0551] In other embodiments also useful for inducing the conversion of a neoplastic cell into a cell (any cell) of the ligament and tendon cell lineage, PEP9 is a peptide of general formula AA¹-AA²-AA³-AA⁴-AA⁵-AA⁶-AA⁷-PEP5; wherein PEP5 is a peptide of formula PEP3-AA¹¹-AA¹²; wherein PEP3 is selected from the group consisting of VPT, APT, TPT, VPA and APV; wherein AA¹¹ is selected from the group consisting of E, K, Q, R, A, D, G and H, in particular is E, K, Q and R; wherein AA¹² is selected from the group consisting of L, M, T, E, Q and H, in particular is L, M or T; wherein AA¹, AA², AA³, AA⁴, and AA⁵ are independently absent or AA^{I} as defined herein; wherein AA⁶ is absent or selected from the group consisting of S, T, C, E, Q, P and R, preferably is S or C; wherein AA⁷ is selected from the group consisting of S, T, C, E, Q, P and R, preferably is S or C. In one particular example, PEP9 is selected from the group consisting of KIPKAXXVPTEL, SIPKAXXVPTEL, HVTKPTXAPTKL, YVPKPXXAPTKL, TVPKPXXAPTQL, AVPKAXXAPTKL, KVGKAXXVPTKL, KASKAXXVPTKL, GSAGPXXTPTKL, AAPASXXVPARL, STPPTXXVPTRL, HVPKPXXAPTKL and RVPSTXXAPVKT.

[0552] In other embodiments also useful for inducing the conversion of a neoplastic cell into a cell (any cell) of the ligament and tendon cell lineage, PEP12 is a peptide of general formula PEP1-AA¹⁷-PEP11; wherein AA¹⁷ is selected from the group consisting of G, A, V, L, I, P, F, M, W, T and S (in particular is selected from the group consisting of M, I, L, V and T); wherein PEP1 is SPIS.

[0553] In other embodiments also useful for inducing the conversion of a neoplastic cell into a cell (any cell) of the ligament and tendon cell lineage, PEP11 is a peptide with 3 amino acids of general formula AA¹⁸-AA¹⁹-AA²⁰; wherein AA¹⁸ is selected from the group consisting of L, V, Q, A and R, in particular is L; wherein AA¹⁹ is selected from the group consisting of F, W, H and Y, in particular is a polar aromatic amino acid such as Y; wherein AA²⁰ is selected from the group consisting of L, F, Y, K, I, V and M, in particular is I. In one particular example, PEP11 is LYI.

[0554] In other embodiments also useful for inducing the conversion of a neoplastic cell into a cell (any cell) of the ligament and tendon cell lineage, PEP1 is SPIS and PEP11 is LYI.

[0555] The definitions of “PEP” pairs and triplets e.g. PEP3:PEP1, PEP5:PEP12, or PEP7:PEP5:PEP1, also most particularly useful for inducing the conversion of a neoplastic cell into a cell (any cell) of the ligament and tendon cell lineage, are as already defined herein to the extent that PEP1, PEP3, PEP5, PEP7, PEP9, PEP11 and PEP12 are particularly useful for these applications as defined in the present L/T section.

[0556] In other embodiments also useful for inducing the conversion of a neoplastic cell into a cell (any cell) of the ligament and tendon cell lineage, said GFR-binding compound is a synthetic molecule as defined herein in the definition section.

[0557] In other embodiments also useful for inducing the conversion of a neoplastic cell into a cell (any cell) of the ligament and tendon cell lineage, said GFR-binding compound is a synthetic peptide, or a variant or analog thereof, or a peptidomimetic.

[0558] Fibroblast Lineage

[0559] Certain embodiments of the invention are particularly useful for inducing the conversion of a neoplastic cell into a cell (any cell) of a fibroblast lineage.

[0560] Certain embodiments of the invention are particularly useful for inducing the conversion of a neoplastic cell into a cell (any cell) of a fibroblast lineage.

[0561] In certain embodiments useful for inducing the conversion of a neoplastic cell into a cell (any cell) of a fibroblast lineage, PEP1 is selected from the group consisting of EPLP, EPLT, SNIT, RSVK and RPVQ.

[0562] In certain embodiments useful for inducing the conversion of a neoplastic cell into a cell (any cell) of a fibroblast lineage, PEP3 is selected from the group consisting of VPT, APT, VPQ, VSQ, SRV and TQV.

[0563] In certain embodiments useful for inducing the conversion of a neoplastic cell into a cell (any cell) of a fibroblast lineage, PEP5 is a peptide of general formula PEP3-AA¹¹-AA¹²; wherein PEP3 is selected from the group consisting of VPT, APT, VPQ, VSQ, SRV and TQV; wherein AA¹¹ is selected from the group consisting of E, K, Q, R, A, D, G and H, in particular is selected from the group consisting of E, K, Q, A, D and H; wherein AA¹² is selected from the group consisting of L, M, T, E, Q and H, in particular is selected from the group consisting of L, E and H. In one particular example, PEP5 is selected from the group consisting of VPTEL, APTKL, APTQL, VPQAL, VSQDL, VPQDL, VPTEE, SRVHH and TQVQL.

[0564] In certain embodiments useful for inducing the conversion of a neoplastic cell into a cell (any cell) of a fibroblast lineage, PEP7 is an amino acid or a peptide with between two and seven amino acids of general formula AA¹-AA²-AA³-AA⁴-AA⁵-AA⁶-AA⁷; wherein AA¹, AA², AA³, AA⁴, and AA⁵ are independently absent or AA^{I} as defined herein; wherein AA⁶ is absent or selected from the group consisting of S, T, C, E, Q, P and R, preferably is selected from the group consisting of C, S, T, E, R and Q; wherein AA⁷ is absent or is selected from the group consisting of S, T, C, E, Q, P and R, preferably is selected from the group consisting of S, C and P; and wherein at least one of AA¹, AA², AA³, AA⁴, AA⁵, AA⁶ or AA⁷ is not absent. In one particular example, PEP7 is selected from the group consisting of KIPKAXX, SIPKAXX, HVTKPTX, YVPKPXX, TVPKPXX, ASAAPXX, ASASPXX, NDEGLEX, SSVKXQP and RNVQXRP.

[0565] In certain embodiments useful for inducing the conversion of a neoplastic cell into a cell (any cell) of a fibroblast lineage, PEP9 is a peptide of general formula AA¹-AA²-AA³-AA⁴-AA⁵-AA⁶-AA⁷-PEP5; wherein PEP5 is a peptide of formula PEP3-AA¹¹-AA¹²; wherein PEP3 is selected from the group consisting of VPT, APT, VPQ, VSQ, SRV and TQV; wherein AA¹¹ is selected from the group consisting of E, K, Q, R, A, D, G and H, in particular is selected from the group consisting of E, K, Q, A, D and H; wherein AA¹² is selected from the group consisting of L, M, T, E, Q and H, in particular is selected from the group consisting of L, E and H; wherein AA¹, AA², AA³, AA⁴, and AA⁵ are independently absent or AA^{I} as defined herein; wherein AA⁶ is absent or selected from the group consisting of S, T, C, E, Q, P and R, preferably is selected from the group consisting of C, S, T, E, R and Q; wherein AA⁷ is selected from the group consisting of S, T, C, E, Q, P and R, preferably is selected from the group consisting of S, C and P. In one particular example, PEP9 is selected from the group consisting of KIPKAXXVPTEL, SIPKAXXVPTEL, HVTKPTXAPTKL, YVPKPXXAPTKL, TVPKPXXAPTQL, ASAAPXXVPQAL, ASASPXXVSQDL, ASASPXXVPQDL, NDEGLEXVPTEE, SSVKXQPSRVHH and RNVQXRPTQVQL.

[0566] In certain embodiments useful for inducing the conversion of a neoplastic cell into a cell (any cell) of a fibroblast lineage, PEP12 is a peptide of general formula PEP1-AA¹⁷-PEP11; wherein AA¹⁷ is selected from the group consisting of G, A, V, L, I, P, F, M, W, T and S (in particular is selected from the group consisting of M, I, L, V and T); wherein PEP1 is selected from the group consisting of EPLP, EPLT, SNIT, RSVK and RPVQ.

[0567] In certain embodiments useful for inducing the conversion of a neoplastic cell into a cell (any cell) of a fibroblast lineage, PEP11 is a peptide with 3 amino acids of general formula AA¹⁸-AA¹⁹-AA²⁰; wherein AA¹⁸ is selected from the group consisting of L, V, Q, A and R; wherein AA¹⁹ is selected from the group consisting of F, W, H, Y, I and K, in particular is selected from the group consisting of Y, I and K; wherein AA²⁰ is selected from the group consisting of L, F, Y, K, I, V and M, in particular is selected from the group consisting of Y, M, V and I. In one particular example, PEP11 is selected from the group consisting of VYY, LYY, QIM, AKV and RKI.

[0568] In certain embodiments useful for inducing the conversion of a neoplastic cell into a cell (any cell) of a fibroblast lineage, PEP1 is selected from the group consisting of EPLP, EPLT, SNIT, RSVK and RPVQ; PEP11 is selected from the group consisting of VYY, LYY, QIM, AKV and RKI; and the pair PEP1:PEP11 is selected from the group consisting of EPLP:VYY, EPLT:LYY, SNIT:QIM, RSVK:KEVQV and RPVQ:KKATV.

[0569] The definitions of “PEP” pairs and triplets e.g. PEP3:PEP1, PEP5:PEP12, or PEP7:PEP5:PEP1, also most particularly useful for inducing the conversion of a neoplastic cell into a cell (any cell) of a fibroblast lineage, are as already defined herein to the extent that PEP1, PEP3, PEP5, PEP7, PEP9, PEP11 and PEP12 are particularly useful for these applications as defined in the present skin regeneration section.

[0570] In certain embodiments useful for inducing the conversion of a neoplastic cell into a cell (any cell) of a fibroblast lineage, said GFR-binding compound is a synthetic molecule as defined herein in the definition section.

[0571] In certain embodiments useful for inducing the conversion of a neoplastic cell into a cell (any cell) of a fibroblast lineage, said GFR-binding compound is a synthetic peptide, or a variant or analog thereof, or a peptidomimetic.

[0572] Reproduction System Lineage

[0573] Certain embodiments of the invention are particularly useful for inducing the conversion of a neoplastic cell into a cell (any cell) of the reproduction system lineage.

[0574] In certain embodiments useful for inducing the conversion of a neoplastic cell into a cell (any cell) of the reproduction system lineage, PEP1 is NAIS.

[0575] In certain embodiments useful for inducing the conversion of a neoplastic cell into a cell (any cell) of the reproduction system lineage, PEP3 is selected from the group consisting of VPT, APT, TPT, VPA and APV.

[0576] In certain embodiments useful for inducing the conversion of a neoplastic cell into a cell (any cell) of the reproduction system lineage, PEP5 is a peptide of general formula PEP3-AA¹¹-AA¹²; wherein PEP3 is selected from the group consisting of VPT, APT, TPT, VPA and APV; wherein AA¹¹ is selected from the group consisting of E, K, Q, R, A, D, G and H, in particular is selected from the group consisting of E, K, Q and R; wherein AA¹² is selected from the group consisting of L, M, T, E, Q and H, in particular is selected from the group consisting of L, M and T. In one particular example, PEP5 is selected from the group consisting of VPTEL, APTKL, APTQL, VPTKL, TPTKM, VPARL, VPTRL and APVKT.

[0577] In certain embodiments useful for inducing the conversion of a neoplastic cell into a cell (any cell) of the reproduction system lineage, PEP7 is an amino acid or a peptide with between two and seven amino acids of general formula AA¹-AA²-AA³-AA⁴-AA⁵-AA⁶-AA⁷; wherein AA¹, AA², AA³, AA⁴, and AA⁵ are independently absent or AA^{I} as defined herein; wherein AA⁶ is absent or selected from the group consisting of S, T, C, E, Q, P and R, preferably is selected from the group consisting of C, S and T; wherein AA⁷ is absent or is selected from the group consisting of S, T, C, E, Q, P and R, preferably is selected from the group consisting of S and C; and wherein at least one of AA¹, AA², AA³, AA⁴, AA⁵, AA⁶ or AA⁷ is not absent. In one particular example, PEP7 is selected from the group consisting of KIPKAXX, SIPKAXX, HVTKPTX, YVPKPXX, TVPKPXX, AVPKAXX, KVGKAXX, KASKAXX, GSAGPXX, AAPASXX, STPPTXX, HVPKPXX and RVPSTXX.

[0578] In certain embodiments useful for inducing the conversion of a neoplastic cell into a cell (any cell) of the reproduction system lineage, PEP9 is a peptide of general formula AA¹-AA²-AA³-AA⁴-AA⁵-AA⁶-AA⁷-PEP5; wherein PEP5 is a peptide of formula PEP3-AA¹¹-AA¹²; wherein PEP3 is selected from the group consisting of VPT, APT, TPT, VPA and APV; wherein AA¹ is selected from the group consisting of E, K, Q, R, A, D, G and H, in particular is selected from the group consisting of E, K, Q and R; wherein AA¹² is selected from the group consisting of L, M, T, E, Q and H, in particular is selected from the group consisting of L, M and T; wherein AA¹, AA², AA³, AA⁴, and AA⁵ are independently absent or AA^{I} as defined herein; wherein AA⁶ is absent or selected from the group consisting of S, T, C, E, Q, P and R, preferably is selected from the group consisting of C, S and T; wherein AA⁷ is selected from the group consisting of S, T, C, E, Q, P and R, preferably is selected from the group consisting of S and C. In one particular example, PEP9 is selected from the group consisting of KIPKAXXVPTEL, SIPKAXXVPTEL, HVTKPTXAPTKL, YVPKPXXAPTKL, TVPKPXXAPTQL, AVPKAXXAPTKL, KVGKAXXVPTKL, KASKAXXVPTKL, GSAGPXXTPTKM, AAPASXXVPARL, STPPTXXVPTRL, HVPKPXXAPTKL and RVPSTXXAPVKT.

[0579] In certain embodiments useful for inducing the conversion of a neoplastic cell into a cell (any cell) of the reproduction system lineage, PEP12 is a peptide of general formula PEP1-AA¹⁷-PEP11; wherein AA¹⁷ is selected from the group consisting of G, A, V, L, I, P, F, M, W, T and S (in particular is selected from the group consisting of M, I, L, V and T); wherein PEP1 is NAIS.

[0580] In certain embodiments useful for inducing the conversion of a neoplastic cell into a cell (any cell) of the reproduction system lineage, PEP11 is a peptide with 3 amino acids of general formula AA¹⁸-AA¹⁹-AA²⁰; wherein AA¹⁸ is selected from the group consisting of L, V, Q, A and R, in particular is L; wherein AA¹⁹ is selected from the group consisting of F, W, H, Y, I and K, in particular is Y; wherein AA²⁰ is selected from the group consisting of L, F, Y, K, I, V and M, in particular is F. In one particular example, PEP11 is LYF.

[0581] In certain embodiments useful for inducing the conversion of a neoplastic cell into a cell (any cell) of the reproduction system lineage, PEP1 is NAIS and PEP11 is LYF.

[0582] The definitions of “PEP” pairs and triplets e.g. PEP3:PEP1, PEP5:PEP12, or PEP7:PEP5:PEP1, also most particularly useful for inducing the conversion of a neoplastic cell into a cell (any cell) of the reproduction system lineage, are as already defined herein to the extent that PEP1, PEP3, PEP5, PEP7, PEP9, PEP11 and PEP12 are particularly useful for these applications as defined in the present fertility and reproduction section.

[0583] In certain embodiments useful for inducing the conversion of a neoplastic cell into a cell (any cell) of the reproduction system lineage, said GFR-binding compound is a synthetic molecule as defined herein in the definition section.

[0584] In certain embodiments useful for inducing the conversion of a neoplastic cell into a cell (any cell) of the reproduction system lineage, said GFR-binding compound is a synthetic peptide, or a variant or analog thereof, or a peptidomimetic.

[0585] Lung Cell Lineage

[0586] Certain embodiments of the invention are particularly useful for inducing the conversion of a neoplastic cell into a cell (any cell) of the lung cell lineage.

[0587] In certain embodiments useful for inducing the conversion of a neoplastic cell into a cell (any cell) of the lung cell lineage, PEP1 is selected from the group consisting of NAIS, SATS, SPIS, EPIS and SPIN.

[0588] In certain embodiments useful for inducing the conversion of a neoplastic cell into a cell (any cell) of the lung cell lineage, PEP3 is selected from the group consisting of VPT, VPE, APT, TPT, VPA, APV, VPQ and VSQ.

[0589] In certain embodiments useful for inducing the conversion of a neoplastic cell into a cell (any cell) of the lung cell lineage, PEP5 is a peptide of general formula PEP3-AA¹¹-AA¹²; wherein PEP3 is selected from the group consisting of VPT, VPE, APT, TPT, VPA, APV, VPQ and VSQ; wherein AA¹¹ is selected from the group consisting of E, K, Q, R, A, D, G and H, in particular is selected from the group consisting of E, K, Q, R, A and D; wherein AA¹² is selected from the group consisting of L, M, T, E, Q and H, in particular selected from the group consisting of L, M and T. In one particular example, PEP5 is selected from the group consisting of VPTEL, VPEKM, APTKL, APTQL, VPTKL, TPTKM, VPARL, VPTRL, APVKT, VPQAL, VSQDL and VPQDL.

[0590] In certain embodiments useful for inducing the conversion of a neoplastic cell into a cell (any cell) of the lung cell lineage, PEP7 is an amino acid or a peptide with between two and seven amino acids of general formula AA¹-AA²-AA³-AA⁴-AA⁵-AA⁶-AA⁷; wherein AA¹, AA², AA³, AA⁴, and AA⁵ are independently absent or AA^{I} as defined herein; wherein AA⁶ is absent or selected from the group consisting of S, T, C, E, Q, P and R, preferably is selected from the group consisting of C, S and T; wherein AA⁷ is absent or is selected from the group consisting of S, T, C, E, Q, P and R, preferably is C or S; and wherein at least one of AA¹, AA², AA³, AA⁴, AA⁵, AA⁶ or AA⁷ is not absent. In one particular example, PEP7 is selected from the group consisting of KIPKAXX, GIPEPXX, SIPKAXX, HVTKPTX, YVPKPXX, TVPKPXX, AVPKAXX, KVGKAXX, KASKAXX, GSAGPXX, AAPASXX, STPPTXX, HVPKPXX, RVPSTXX, ASAAPXX and ASASPXX.

[0591] In certain embodiments useful for inducing the conversion of a neoplastic cell into a cell (any cell) of the lung cell lineage, PEP9 is a peptide of general formula AA¹-AA²-AA³-AA⁴-AA⁵-AA⁶-AA⁷-PEP5; wherein PEP5 is a peptide of formula PEP3-AA¹¹-AA¹²; wherein PEP3 is selected from the group consisting of VPT, VPE, APT, TPT, VPA, APV, VPQ and VSQ; wherein AA¹¹ is selected from the group consisting of E, K, Q, R, A, D, G and H, in particular E, K, Q, R, A and D; wherein AA¹² is selected from the group consisting of L, M, T, E, Q and H, in particular selected from the group consisting of L, M and T; wherein AA¹, AA², AA³, AA⁴, and AA⁵ are independently absent or AA^{I} as defined herein; wherein AA⁶ is absent or selected from the group consisting of S, T, C, E, Q, P and R, preferably is selected from the group consisting of C, S and T; wherein AA⁷ is selected from the group consisting of S, T, C, E, Q, P and R, preferably is C or S. In one particular example, PEP9 is selected from the group consisting of KIPKAXXVPTEL, GIPEPXXVPEKM, SIPKAXXVPTEL, HVTKPTXAPTKL, YVPKPXXAPTKL, TVPKPXXAPTQL, AVPKAXXAPTKL, KVGKAXXVPTKL, KASKAXXVPTKL, GSAGPXXTPTKM, AAPASXXVPARL, STPPTXXVPTRL, HVPKPXXAPTKL, RVPSTXXAPVKT, ASAAPXXVPQAL, ASASPXXVSQDL and ASASPXXVPQDL.

[0592] In certain embodiments useful for inducing the conversion of a neoplastic cell into a cell (any cell) of the lung cell lineage, PEP12 is a peptide of general formula PEP1-AA¹⁷-PEP11; wherein AA¹⁷ is selected from the group consisting of G, A, V, L, I, P, F, M, W, T and S (in particular is selected from the group consisting of M, I, L, V and T); wherein PEP1 is selected from the group consisting of NAIS, SATS, SPIS, EPIS and SPIN.

[0593] In certain embodiments useful for inducing the conversion of a neoplastic cell into a cell (any cell) of the lung cell lineage, PEP11 is a peptide with 3 amino acids of general formula AA¹⁸-AA¹⁹-AA²⁰; wherein AA¹⁸ is selected from the group consisting of L, V, Q, A and R, in particular is L; wherein AA¹⁹ is selected from the group consisting of F, W, H and Y (in particular is a polar aromatic amino acid such as Y); wherein AA²⁰ is selected from the group consisting of L, F, Y, K, I, V and M, in particular is selected from the group consisting of L, F, Y, and K. In one particular example, PEP11 is selected from the group consisting of LYF, LYY, LYK and LYL.

[0594] In certain embodiments useful for inducing the conversion of a neoplastic cell into a cell (any cell) of the lung cell lineage, PEP1 is selected from the group consisting of NAIS, SATS, SPIS, EPIS and SPIN; PEP11 is selected from the group consisting of LYF, LYY, LYK and LYL; and the pair PEP1:PEP11 is selected from the group consisting of NAIS:LYF, SATS:LYY, SPIS:LYK, EPIS:LYL and SPIN:LYF.

[0595] The definitions of “PEP” pairs and triplets e.g. PEP3:PEP1, PEP5:PEP12, or PEP7:PEP5:PEP1, also most particularly useful for inducing the conversion of a neoplastic cell into a cell (any cell) of the lung cell lineage, are as already defined herein to the extent that PEP1, PEP3, PEP5, PEP7, PEP9, PEP11 and PEP12 are particularly useful for these applications as defined in the present lung section.

[0596] In certain embodiments useful for inducing the conversion of a neoplastic cell into a cell (any cell) of the lung cell lineage, said GFR-binding compound is a synthetic molecule as defined herein in the definition section.

[0597] In certain embodiments useful for inducing the conversion of a neoplastic cell into a cell (any cell) of the lung cell lineage, said GFR-binding compound is a synthetic peptide, or a variant or analog thereof, or a peptidomimetic.

[0598] Muscle Cell Lineage

[0599] Certain embodiments of the invention are particularly useful for inducing the conversion of a neoplastic cell into a cell (any cell) of the muscle cell lineage.

[0600] In certain embodiments useful for inducing the conversion of a neoplastic cell into a cell (any cell) of the muscle cell lineage, PEP1 is RSVK or RPVQ.

[0601] In certain embodiments useful for inducing the conversion of a neoplastic cell into a cell (any cell) of the muscle cell lineage, PEP3 is selected from the group consisting of VPQ, VSQ, VPT, SRV and TQV.

[0602] In certain embodiments useful for inducing the conversion of a neoplastic cell into a cell (any cell) of the muscle cell lineage, PEP5 is a peptide of general formula PEP3-AA¹¹-AA¹²; wherein PEP3 is selected from the group consisting of VPQ, VSQ, VPT, SRV and TQV; wherein AA¹¹ is selected from the group consisting of E, K, Q, R, A, D, G and H, in particular A, D, E, H, Q and G; wherein AA¹² is selected from the group consisting of L, M, T, E, Q and H, in particular L, E, H and Q. In one particular example, PEP5 is selected from the group consisting of VPQAL, VSQDL, VPQDL, VPTEE, VPTGQ, SRVHH and TQVQL.

[0603] In certain embodiments useful for inducing the conversion of a neoplastic cell into a cell (any cell) of the muscle cell lineage, PEP7 is an amino acid or a peptide with between two and seven amino acids of general formula AA¹-AA²-AA³-AA⁴-AA⁵-AA⁶-AA⁷; wherein AA¹, AA², AA³, AA⁴, and AA⁵ are independently absent or AA^{I} as defined herein; wherein AA⁶ is absent or selected from the group consisting of S, T, C, E, Q, P and R, preferably C, S, Q, R or E; wherein AA⁷ is absent or is selected from the group consisting of S, T, C, E, Q, P and R, preferably is S, P or C; and wherein at least one of AA¹, AA², AA³, AA⁴, AA⁵, AA⁶ or AA⁷ is not absent. In one particular example, PEP7 is selected from the group consisting of ASAAPXX, ASASPXX, NDEGLEX, SSVKXQP and RNVQXRP.

[0604] In certain embodiments useful for inducing the conversion of a neoplastic cell into a cell (any cell) of the muscle cell lineage, PEP9 is a peptide of general formula AA¹-AA²-AA³-AA⁴-AA⁵-AA⁶-AA⁷-PEP5; wherein PEP5 is a peptide of formula PEP3-AA¹¹-AA¹²; wherein PEP3 is selected from the group consisting of VPQ, VSQ, VPT, SRV and TQV; wherein AA¹ is selected from the group consisting of E, K, Q, R, A, D, G and H, in particular A, D, E, H, Q and G; wherein AA¹² is selected from the group consisting of L, M, T, E, Q and H, in particular L, E, H and Q; wherein AA¹, AA², AA³, AA⁴, and AA⁵ are independently absent or AA^{I} as defined herein; wherein AA⁶ is absent or selected from the group consisting of S, T, C, E, Q, P and R, preferably C, S, Q, R or E; wherein AA⁷ is absent or is selected from the group consisting of S, T, C, E, Q, P and R, preferably is S, P or C. In one particular example, PEP9 is selected from the group consisting of ASAAPXXVPQAL, ASASPXXVSQDL, ASASPXXVPQDL, NDEGLEXVPTEE, NDEGLEXVPTGQ, SSVKXQPSRVHH and RNVQXRPTQVQL.

[0605] In certain embodiments useful for inducing the conversion of a neoplastic cell into a cell (any cell) of the muscle cell lineage, PEP12 is a peptide of general formula PEP1-AA¹⁷-PEP11; wherein AA¹⁷ is selected from the group consisting of G, A, V, L, I, P, F, M, W, T and S (in particular is I or M); wherein PEP1 is RSVK or RPVQ.

[0606] In certain embodiments useful for inducing the conversion of a neoplastic cell into a cell (any cell) of the muscle cell lineage, PEP11 is a peptide with 3 amino acids of general formula AA¹⁸-AA¹⁹-AA²⁰; wherein AA¹⁸ is selected from the group consisting of L, V, Q, A and R, in particular is A or R; wherein AA¹⁹ is selected from the group consisting of AA^{VII} amino acids (in particular is K); wherein AA²⁰ is selected from the group consisting of L, F, Y, K, I, V and M, in particular is V or I. In one particular example, PEP11 is AKV or RKI.

[0607] In certain embodiments useful for inducing the conversion of a neoplastic cell into a cell (any cell) of the muscle cell lineage, PEP1 is RSVK or RPVQ; PEP11 is is AKV or RKI; and the pair PEP1:PEP11 is RSVK:AKV or RPVQ:RKI.

[0608] The definitions of “PEP” pairs and triplets e.g. PEP3:PEP1, PEP5:PEP12, or PEP7:PEP5:PEP1, useful for inducing the conversion of a neoplastic cell into a cell (any cell) of the muscle cell lineage, are as already defined herein to the extent that PEP1, PEP3, PEP5, PEP7, PEP9, PEP11 and PEP12 are particularly useful for these applications as defined in the present muscle section.

[0609] In certain embodiments useful for inducing the conversion of a neoplastic cell into a cell (any cell) of the muscle cell lineage, said GFR-binding compound is a synthetic molecule as defined herein in the definition section.

[0610] In certain embodiments useful for inducing the conversion of a neoplastic cell into a cell (any cell) of the muscle cell lineage, said GFR-binding compound is a synthetic peptide, or a variant or analog thereof, or a peptidomimetic.

[0611] Blood Cell Lineage

[0612] Certain embodiments of the invention are particularly useful for inducing the conversion of a neoplastic cell into a cell (any cell) of the blood cell lineage.

[0613] In certain embodiments useful for inducing the conversion of a neoplastic cell into a cell (any cell) of the blood cell lineage, PEP1 is SNIT.

[0614] In certain embodiments useful for inducing the conversion of a neoplastic cell into a cell (any cell) of the blood cell lineage, PEP3 is selected from the group consisting of TPT, VPA, VPT, APT, APV, VPQ, VSQ, SRV and TQV.

[0615] In certain embodiments useful for inducing the conversion of a neoplastic cell into a cell (any cell) of the blood cell lineage, PEP5 is a peptide of general formula PEP3-AA^{1l}-AA¹²; wherein PEP3 is selected from the group consisting of TPT, VPA, VPT, APT, APV, VPQ, VSQ, SRV and TQV; wherein AA¹¹ is selected from the group consisting of E, K, Q, R, A, D, G and H; wherein AA¹² is selected from the group consisting of L, M, T, E, Q and H. In one particular example, PEP5 is selected from the group consisting of TPTKM, VPARL, VPTRL, APTKL, APVKT, VPQAL, VSQDL, VPQDL, VPTEE, VPTGQ, SRVHH and TQVQL.

[0616] In certain embodiments useful for inducing the conversion of a neoplastic cell into a cell (any cell) of the blood cell lineage, PEP7 is an amino acid or a peptide with between two and seven amino acids of general formula AA¹-AA²-AA³-AA⁴-AA⁵-AA⁶-AA⁷; wherein AA¹, AA², AA³, AA⁴, and AA⁵ are independently absent or AA^{I} as defined herein; wherein AA⁶ is absent or selected from the group consisting of S, T, C, E, Q, P and R, preferably is selected from the group consisting of S, C, E, Q and R; wherein AA⁷ is absent or is selected from the group consisting of S, T, C, E, Q, P and R, preferably is selected from the group consisting of C, S and P; and wherein at least one of AA¹, AA², AA³, AA⁴, AA⁵, AA⁶ or AA⁷ is not absent. In one particular example, PEP7 is selected from the group consisting of GSAGPXX, AAPASXX, STPPTXX, HVPKPXX, RVPSTXX, ASAAPXX, ASASPXX, NDEGLEX, SSVKXQP and RNVQXRP.

[0617] In certain embodiments useful for inducing the conversion of a neoplastic cell into a cell (any cell) of the blood cell lineage, PEP9 is a peptide of general formula AA¹-AA²-AA³-AA⁴-AA⁵-AA⁶-AA⁷-PEP5; wherein PEP5 is a peptide of formula PEP3-AA¹¹-AA¹²; wherein PEP3 is selected from the group consisting of TPT, VPA, VPT, APT, APV, VPQ, VSQ, SRV and TQV; wherein AA¹¹ is selected from the group consisting of E, K, Q, R, A, D, G and H; wherein AA¹² is selected from the group consisting of L, M, T, E, Q and H; wherein AA¹, AA², AA³, AA⁴, and AA⁵ are independently absent or AA^{I} as defined herein; wherein AA⁶ is absent or selected from the group consisting of S, T, C, E, Q, P and R, preferably is selected from the group consisting of S, C, E, Q and R; wherein AA⁷ is absent or is selected from the group consisting of S, T, C, E, Q, P and R, preferably is selected from the group consisting of C, S and P.

[0618] In one particular example, PEP9 is selected from the group consisting of GSAGPXXTPTKM, AAPASXXVPARL, STPPTXXVPTRL, HVPKPXXAPTKL, RVPSTXXAPVKT, ASAAPXXVPQAL, ASASPXXVSQDL, ASASPXXVPQDL, NDEGLEXVPTEE, NDEGLEXVPTGQ, SSVKXQPSRVHH and RNVQXRPTQVQL.

[0619] In certain embodiments useful for inducing the conversion of a neoplastic cell into a cell (any cell) of the blood cell lineage, PEP12 is a peptide of general formula PEP1-AA¹⁷-PEP11; wherein AA¹⁷ is selected from the group consisting of G, A, V, L, I, P, F, M, W, T and S (in particular is selected from the group consisting of M, I, V and T); wherein PEP1 is SNIT.

[0620] In certain embodiments useful for inducing the conversion of a neoplastic cell into a cell (any cell) of the blood cell lineage, PEP11 is a peptide with 3 amino acids of general formula AA¹⁸-AA¹⁹-AA²⁰; wherein AA¹⁸ is selected from the group consisting of L, V, Q, A and R, in particular is Q; wherein AA¹⁹ is selected from the group consisting of F, W, H, I and Y (in particular is I); wherein AA²⁰ is selected from the group consisting of L, F, Y, K, I, V and M, in particular is M. In one particular example, PEP11 is QIM.

[0621] In certain embodiments useful for inducing the conversion of a neoplastic cell into a cell (any cell) of the blood cell lineage, PEP1 is SNIT and PEP11 is QIM.

[0622] The definitions of “PEP” pairs and triplets e.g. PEP3:PEP1, PEP5:PEP12, or PEP7:PEP5:PEP1, useful for inducing the conversion of a neoplastic cell into a cell (any cell) of the blood cell lineage, are as already defined herein to the extent that PEP1, PEP3, PEP5, PEP7, PEP9, PEP11 and PEP12 are particularly useful for these applications as defined in the present blood section.

[0623] In certain embodiments useful for inducing the conversion of a neoplastic cell into a cell (any cell) of the blood cell lineage, said GFR-binding compound is a synthetic molecule as defined herein in the definition section.

[0624] In certain embodiments useful for inducing the conversion of a neoplastic cell into a cell (any cell) of the blood cell lineage, said GFR-binding compound is a synthetic peptide, or a variant or analog thereof, or a peptidomimetic.

[0625] Adipocyte Cell Lineage

[0626] Certain embodiments of the invention are particularly useful for inducing the conversion of a neoplastic cell into a cell (any cell) of the adipocyte lineage.

[0627] In certain embodiments useful for inducing the conversion of a neoplastic cell into a cell (any cell) of the adipocyte lineage, PEP1 is SAIS or NAIS.

[0628] In certain embodiments useful for inducing the conversion of a neoplastic cell into a cell (any cell) of the adipocyte lineage, PEP3 is selected from the group consisting of VPT, VPE, APT, TPT, VPA, APV, VPQ and VSQ.

[0629] In certain embodiments useful for inducing the conversion of a neoplastic cell into a cell (any cell) of the adipocyte lineage, PEP5 is a peptide of general formula PEP3-AA¹¹-AA¹²; wherein PEP3 is selected from the group consisting of VPT, VPE, APT, TPT, VPA, APV, VPQ and VSQ; wherein AA¹¹ is selected from the group consisting of E, K, Q, R, A, D, G and H, in particular is selected from the group consisting of E, K, Q, R, A and D; wherein AA¹² is selected from the group consisting of L, M, T, E, Q and H, in particular selected from the group consisting of L, M and T. In one particular example, PEP5 is selected from the group consisting of VPTEL, VPEKM, APTKL, APTQL, VPTKL, TPTKM, VPARL, VPTRL, APVKT, VPQAL, VSQDL and VPQDL.

[0630] In certain embodiments useful for inducing the conversion of a neoplastic cell into a cell (any cell) of the adipocyte lineage, PEP7 is an amino acid or a peptide with between two and seven amino acids of general formula AA¹-AA²-AA³-AA⁴-AA⁵-AA⁶-AA⁷; wherein AA¹, AA², AA³, AA⁴, and AA⁵ are independently absent or AA^{I} as defined herein; wherein AA⁶ is absent or selected from the group consisting of S, T, C, E, Q, P and R, preferably is selected from the group consisting of C, S and T; wherein AA⁷ is absent or is selected from the group consisting of S, T, C, E, Q, P and R, preferably is C or S; and wherein at least one of AA¹, AA², AA³, AA⁴, AA⁵, AA⁶ or AA⁷ is not absent. In one particular example, PEP7 is selected from the group consisting of KIPKAXX, GIPEPXX, SIPKAXX, HVTKPTX, YVPKPXX, TVPKPXX, AVPKAXX, KVGKAXX, KASKAXX, GSAGPXX, AAPASXX, STPPTXX, HVPKPXX, RVPSTXX, ASAAPXX and ASASPXX.

[0631] In certain embodiments useful for inducing the conversion of a neoplastic cell into a cell (any cell) of the adipocyte lineage, PEP9 is a peptide of general formula AA¹-AA²-AA³-AA⁴-AA⁵-AA⁶-AA⁷-PEP5; wherein PEP5 is a peptide of formula PEP3-AA¹¹-AA¹²; wherein PEP3 is selected from the group consisting of VPT, VPE, APT, TPT, VPA, APV, VPQ and VSQ; wherein AA¹ is selected from the group consisting of E, K, Q, R, A, D, G and H, in particular E, K, Q, R, A and D; wherein AA¹² is selected from the group consisting of L, M, T, E, Q and H, in particular selected from the group consisting of L, M and T; wherein AA¹, AA², AA³, AA⁴, and AA⁵ are independently absent or AA^{I} as defined herein; wherein AA⁶ is absent or selected from the group consisting of S, T, C, E, Q, P and R, preferably is selected from the group consisting of C, S and T; wherein AA⁷ is selected from the group consisting of S, T, C, E, Q, P and R, preferably is C or S. In one particular example, PEP9 is selected from the group consisting of KIPKAXXVPTEL, GIPEPXXVPEKM, SIPKAXXVPTEL, HVTKPTXAPTKL, YVPKPXXAPTKL, TVPKPXXAPTQL, AVPKAXXAPTKL, KVGKAXXVPTKL, KASKAXXVPTKL, GSAGPXXTPTKM, AAPASXXVPARL, STPPTXXVPTRL, HVPKPXXAPTKL, RVPSTXXAPVKT, ASAAPXXVPQAL, ASASPXXVSQDL and ASASPXXVPQDL.

[0632] In certain embodiments useful for inducing the conversion of a neoplastic cell into a cell (any cell) of the adipocyte lineage, PEP12 is a peptide of general formula PEP1-AA¹⁷-PEP11; wherein AA¹⁷ is selected from the group consisting of G, A, V, L, I, P, F, M, W, T and S (in particular is selected from the group consisting of M, V and T); wherein PEP1 is SAIS or NAIS.

[0633] In certain embodiments useful for inducing the conversion of a neoplastic cell into a cell (any cell) of the adipocyte lineage, PEP11 is a peptide with 3 amino acids of general formula AA¹⁸-AA¹⁹-AA²⁰; wherein AA¹⁸ is selected from the group consisting of L, V, Q, A and R, in particular is L; wherein AA¹⁹ is selected from the group consisting of F, W, H and Y (in particular is a polar aromatic amino acid such as Y); wherein AA²⁰ is selected from the group consisting of L, F, Y, K, I, V and M, in particular is L or F. In one particular example, PEP11 is LYL or LYF.

[0634] In certain embodiments useful for inducing the conversion of a neoplastic cell into a cell (any cell) of the adipocyte lineage, PEP1 is SAIS or NAIS; PEP11 is LYL or LYF; and the pair PEP1:PEP11 is SAIS:LYL or NAIS:LYF.

[0635] The definitions of “PEP” pairs and triplets e.g. PEP3:PEP1, PEP5:PEP12, or PEP7:PEP5:PEP1, useful for inducing the conversion of a neoplastic cell into a cell (any cell) of the adipocyte lineage, are as already defined herein to the extent that PEP1, PEP3, PEP5, PEP7, PEP9, PEP11 and PEP12 are particularly useful for these applications as defined in the present adipose tissue section.

[0636] In certain embodiments useful for inducing the conversion of a neoplastic cell into a cell (any cell) of the adipocyte lineage, said GFR-binding compound is a synthetic molecule as defined herein in the definition section.

[0637] In certain embodiments useful for inducing the conversion of a neoplastic cell into a cell (any cell) of the adipocyte lineage, said GFR-binding compound is a synthetic peptide, or a variant or analog thereof, or a peptidomimetic.

### III. Bioactive Carriers

[0638] The present invention achieves its intended therapeutic action(s) i.e. the treatment of a neoplastic disease via extracellular, non-mutagenic, recoding or conversion of neoplastic cells, by functional combination (or association) of at least two bioactive substances, namely, a GFR-binding compound (e.g. non-cyclic or cyclic) as described above and a bioactive carrier.

[0639] In one example, said GFR-binding compound and said bioactive carrier are thus operably associated, combined, linked or connected as defined herein and thus form a pharmaceutical association or combination for uses and methods of the present invention.

[0640] In one aspect, the present disclosure provides a bioactive carrier, as part of a pharmaceutical association as defined herein, as an active principle for use in methods and uses described herein.

[0641] Suitable bioactive carriers for implementing embodiments of the invention include any substance (i) which can interact and/or be compatible with a biological system and (ii) participate to the intended biological activity of a treatment as described in the present application.

[0642] As may be used herein, the term “bioactive carrier”, “biocompatible carrier”, “bioactive material”, “biocompatible material”, “bioactive substance”, “bio-substance”, “biocompatible substance”, are used interchangeably.

[0643] A suitable bioactive carrier is compatible with living cells, tissues, organs or systems posing little to no risk of injury, toxicity or rejection by the immune system. Bioactive carriers suitable for implementing embodiments of the present invention include, but are not limited to, (a) a biopolymer such as (a1) collagen, (a2) fibrin; (b) a synthetic polymer such as (b1) ultra-high molecular weight polyethylene (UHMWPE), (b2) polyurethane (PE), (b3) polyurethane (PU), (b4) polytetrafuoroethylene (PTFE), (b5) polyacetal (PA), (b6) polymethylmethacrylate (PMMA), (b7) polyethylene terepthalate (PET), (b8) silicone rubber (SR), (b9) polyetheretherketone (PEEK), (b10) poly(lactic acid) (PLA), (b11) polysulfone (PS), (b12) PLLA, (b13) PLGA or (b14) PLDA; (c) metals and metal oxides such as (c1) gold and gold alloys, (c2) silver and silver alloys, (c3) platinum and platinum alloys, (c4) tantalum, (c5) Ti6Al4V, (c6) 316L stainless steel, (c7) Co—Cr Alloys, (c8) titanium alloys such as such as □-type, β-type, □+□-type Ti alloy, Ti—Nb alloys such as Ti29Nb13Ta4.6Zr or Ti35Nb4Sn); (d) metallic glasses; (e) amorphous alloys such as Zr-based alloys; (f) porous metals such as the ones reported in Ryan et al., 2006, Biomaterials, 27, 2651; Lopez-Heredia et al. 2008, Biomaterials, 29, 2608; Ryan et al., 2008, Biomaterials, 29, 3625; Li et al., 2007, Biomaterials, 28, 2810; or Hollander et al., 2006, Biomaterials, 27, 955; all being incorporated herein in their entirety; (g) gel or solid ceramics such as (g1) alumina, (g2) zirconia, (g3) carbon, (g4) titania, (g5) bioglass, or (g6) hydroxyapatite (HA); (h) composites such as (h1) silica/SR, (h2) CF/UHMWPE, (h3) CF/PTFE, (h4) HA/PE, (h5) CF/epoxy, (h6) CF/PEEK, (h7) CF/C or (h8) Al₂O₃/PTFE; (i) hydrogels such as (i1) polyisocyanopeptide hydrogels such as oligo(ethylene)glycol polyisocyanopeptides as described, for instance, in Van Buul, et al.; Chem. Sci. 4, 2357-2363 (2013), incorporated herein by reference in its entirety, (i2) polysaccharides such as alginates, chitosans, chitins, guar gums, pectins, gellan gums, heparins, carrageenans, hyaluronans, starches, agars, xanthan gums, methylcellulose, carboxymethylcellulose, hydroxypropyl methyl cellulose, (i3) polyglycols such as polyethyleneglycol or polypropyleneglycol, (i4) polyvinylpyrrolidone, (i5) poly(vinylalcohol), (i6) polyacrylic acids, (i7) glycerophosphates, (i8) 2-acrylamido-2-methylpropanesulfonic acid, (i9) polyphosphazenes; (j) other suitable materials such as demineralized bone matrix; and any combinations thereof.

[0644] Suitable sources of bioactive carriers for implementing embodiments of the present invention include, but are not limited to, autographs, allographs, xenographs, plants, solutions, excipients, ceramics, metals, metal alloys, organic and inorganic polymers, bioglasses, carbon-containing structures, or combination thereof.

[0645] Particularly suitable as bioactive carriers for implementing embodiments of the present invention include bioactive carriers comprising at least one naturally occurring hydroxyl group on at least one surface thereof and bioactive carriers which do not naturally comprise at least one hydroxyl group on a surface thereof but which have been modified using conventional surface treatment techniques such that at least one hydroxyl group is present on a surface of the bioactive carrier. In one example, said hydroxyl group is an available hydroxyl group i.e. it is not prevented from interacting and/or reacting with a compound of the present disclosure. Suitable as bioactive carriers naturally containing hydroxyl groups on a surface thereof for implementing embodiments of the invention specifically include metal oxides such as titanium oxides and non-metal oxides such ceramics. Also suitable as bioactive carriers for implementing embodiments of the invention include bioactive carriers comprising at least one naturally occurring carboxylate group (—COOH) or amine group (—NH₂) on at least one of a surface thereof and bioactive carriers which do not naturally comprise at least one carboxylate group (—COOH) or amine group (—NH₂) onto a surface thereof but which have been modified using conventional surface treatment techniques such that at least one carboxylate group (—COOH) or amine group (—NH₂) is present on a surface of the bioactive carrier.

[0646] In one example, said bioactive carrier includes a biomaterial. Suitable biomaterials for implementing certain embodiments of the present disclosure may be derived from nature or synthesized in the laboratory using a variety of chemical approaches utilizing metallic components, polymers, ceramics or composite materials. They are often used and/or adapted for a medical application, and thus comprise whole or part of a living structure or biomedical device. Suitable biomaterials for implementing certain embodiments of the present disclosure are commonly used in joint replacements, bone plates, bone cement, artificial ligaments and tendons, dental implants for tooth fixation, blood vessel prostheses, heart valves, skin repair devices (artificial tissue), cochlear replacements, contact lenses, breast implants, drug delivery mechanisms, sustainable materials, vascular grafts, stents, nerve conduits. Particularly suitable biomaterials for implementing certain embodiments of the present disclosure such as metals and alloys (pages 94-95), ceramics (pages 95-97), polymeric biomaterials (pages 97-98) and biocomposite materials (pages 98-99) are described in Nitesh et al., International Journal of Emerging Technology and Advanced Engineering, ISSN 2250-2459, Volume 2, Issue 4, 2012, which is herein incorporated by reference in its entirety.

[0647] In one particular example, said bioactive carrier is a biomaterial.

[0648] In certain embodiments, particularly suitable bioactive carriers are selected from the group consisting of bioinert biomaterials, bioactive biomaterials and bioresorbable biomaterials.

[0649] The nature of the biomaterial is an important parameter. Particularly good results have been obtained using bioactive carriers composed mostly with the main material component of the tissue where the cells need to be recoded. For example, it was discovered that particularly good results may be obtained when a solid ceramic component (granulated ceramic powder or ceramic scaffolds) or a gel ceramic component is used in combination of a GFR-binding peptide of the present disclosure to recode osteosarcoma cells and thus protect from bone cancers. For example, it was also discovered that particularly good results may be obtained when collagen, in particular collagen types I, II, III and XI, is used in combination of a GFR-binding peptide of the present disclosure to recode chondrosarcomas and thus protect from cartilage cancers. For example, it was also discovered that particularly good results may be obtained when collagen, in particular collagen types I and III, or a biodegradable hydrogel is used in combination with a GFR-binding peptide of the present disclosure to recode disfunctioning muscle, skin, tendon and ligament cells. For example, it was also discovered that particularly good results may be obtained when a collagen or a biodegradable hydrogel is used in combination with a GFR-binding peptide of the present disclosure to recode cells and/or restore functions of vascular, neuron, eye retina, renal, wound healing, hair, fertility and reproduction, lung, and adipose tissues.

[0650] Bioinert biomaterials: As used herein, unless indicated otherwise or contradictory in context, the term “bioinert biomaterials” refers to any material that once placed in the human body has minimal interaction with its surrounding tissue. Examples of these are stainless steel, titanium, alumina, partially stabilised zirconia, and ultra-high molecular weight polyethylene. Generally a fibrous capsule might form around bioinert implants hence its biofunctionality relies on tissue integration through the implant.

[0651] Bioactive biomaterial: As used herein, unless indicated otherwise or contradictory in context, the term “bioactive biomaterial” refers to a material which, upon being placed within the human body, interacts with the surrounding bone and in some cases, even soft tissue. This occurs through a time-dependent kinetic modification of the surface, triggered by their implantation within the living bone. An ion-exchange reaction between the bioactive implant and surrounding body fluids, results in the formation of a biologically active carbonate apatite (CHAp) layer on the implant that is chemically and crystallographically equivalent to the mineral phase in bone. Examples of these materials are synthetic hydroxyapatite [Ca₁₀(PO₄)₆(OH)₂], glass ceramic A-W and Bioglass®.

[0652] Bioresorbable Biomaterials: As used herein, unless indicated otherwise or contradictory in context, the term “bioresorbable biomaterials” refers to a material which, upon placement within the human body, starts to dissolve (resorbed) and slowly replaced by advancing tissue (such as bone). Examples of bioresorbable materials include, but are not limited to, tricalcium phosphate [Ca₃(PO₄)₂], polylactic-polyglycolic acid copolymers, calcium oxide, calcium carbonate and gypsum.

[0653] Therefore, no particular limitation should be ascribed to the substance, material or molecule suitable as being bioactive carriers for implementing embodiments of the present invention insofar as said substance, material or molecule is (a) biocompatible as defined herein and (b) combinable or associable with a GFR-binding compound as defined herein. In one preferred example, said bioactive carrier has a stiffness of at least 5 kPa, more preferably at least 35 kPa and preferably not more than 3 or 5 GPa as measured using conventional Dynamic Mechanical Analysis such as described in details in Gong J P et al., Double-network hydrogels with extremely high mechanical strength, Adv Mater 2003, 15(14), 1155e8, which is incorporated herein by reference.

[0654] In one particular example, a biomaterial as defined herein for use in neuron-related applications has a stiffness comprised between about 0.01 kPa and about 3 kPa, preferably between about 0.01 kPa and about 1 kPa. In one particular example, a biomaterial as defined herein for use in muscle, cartilage and tendon/ligament-related applications has a stiffness comprised between about 3 kPa and about 200 kPa, preferably between about 10 kPa and about 30 kPa. In one particular example, a biomaterial as defined herein for use in bone-related applications has a stiffness comprised between about 30 kPa and about 2 GPa, preferably between about 70 kPa and about 200 kPa. In one particular example, a biomaterial as defined herein for use in hair-related applications has a stiffness comprised between about 0.01 kPa and about 200 kPa, preferably between about 3 kPa and about 70 kPa. In one particular example, a biomaterial as defined herein for use in endothelization-related applications has a stiffness comprised between about 0.01 kPa and about 500 kPa. In one particular example, a biomaterial as defined herein for use in angiogenesis-related applications has a stiffness comprised between about 0.5 kPa and about 100 kPa. In one particular example, a biomaterial as defined herein for use in wound healing and skin-related applications has a stiffness comprised between about 0.01 kPa and about 70 kPa.

[0655] Available hydroxyl groups: As used herein, unless indicated otherwise or contradictory in context, the term “free hydroxyl” or “available hydroxyl” means an hydroxyl group, which may be —OH or a radical (—O⁻) or an anion (—O⁻) fully or partially ionised, which is able to/free to act as a nucleophile in a reaction with an electrophile such as compound (A) or compound (B) defined below.

[0656] Available hydroxyl-containing surface: As used herein, unless indicated otherwise or contradictory in context, the term “available hydroxyl-containing surface” or “free hydroxyl-containing surface” means a surface containing at least one free or available hydroxyl group as defined herein.

[0657] Ceramics: As used herein, unless indicated otherwise or contradictory in context, the term “ceramic” refers to an inorganic material with a high melting point, above 1000° C. Most typically, materials referred to as “ceramics” are obtained by a process in which raw material solid particles are heated in order to sinter them. Materials referred to as “ceramics” may broadly be split into two groups, these being “oxide ceramics” and “non-oxide ceramics”. “Oxide ceramics” include, but are not limited to, alkaline earth oxides such as MgO and BaO, Al₂O₃ and aluminates, TiO₂ and titanates, ZrO₂ and zirconates, silicates such as clays and clay-derived materials. Since the term “ceramics” may encompass crystalline, partially amorphous and fully amorphous materials, the term “oxide ceramics” may also be interpreted as covering fully amorphous silicate glasses. “Non-oxide ceramics” include, but are not limited to, carbides and nitrides, and also borides and silicides, for example silicon carbide and silicon nitride, and also metal carbides and nitrides. In one particular example, solid ceramics e.g. in granulated powder or as a scaffold, is used as a bioactive carrier in the meaning of the present disclosure in bone-related applications. In one particular example, gel ceramics is used as a bioactive carrier in the meaning of the present disclosure in bone-related applications.

[0658] Metal oxides: As used herein, unless indicated otherwise or contradictory in context, the term “metal oxide” means a chemical compound that contains at least one oxygen atom and one other element in its chemical formula. Metal oxides typically contain an anion of oxygen in the oxidation state of −2. They can be obtained by hydrolysis or air/oxygen oxidation. Examples of such metal oxides are titanium oxides (e.g. TiO, Ti₂O₃, TiO₂), silicon oxide (SiO₂), aluminum oxide (Al₂O₃), iron (II, III) oxides such as Fe₂O₃, and zinc oxide (ZnO).

[0659] Biopolymer: As used herein, unless indicated otherwise or contradictory in context, the term “biopolymer” refers to a polymer produced by living organisms and includes, but is not limited to, polypeptides and proteins (such as collagen and fibrin), polysaccharides (such as cellulose, starch, chitin and chitosan), nucleic acids (such as DNA and RNA), and hydrides thereof.

[0660] Hydrogel: As used herein, unless indicated otherwise or contradictory in context, the term “hydrogel” refers to “Hydrogel” refers to a class of polymeric materials which are swollen in an aqueous medium, but which do not dissolve in water. Hydrogels are highly absorbent (they can contain over 99% water) natural or synthetic polymers. Hydrogels also possess a degree of flexibility very similar to natural tissue, due to their significant water content. U.S. Pat. No. 6,475,516, for example, provides hydrogels being covalently bound to the surface of an in-dwelling medical device such as an implant, which may be functionalized with a GFR-binding compound of the present disclosure using, for instance, a process as described herein. In one particular example, biodegradable hydrogels are used as bioactive carriers in the meaning of the present disclosure.

[0661] Collagen: As used herein, unless indicated otherwise or contradictory in context, the term “collagen” refers to the main structural protein of the various connective tissues in animals which is mostly found in fibrous tissues such as tendons, ligaments and skin, and is also abundant in corneas, cartilage, bones, blood vessels, the gut, and intervertebral discs. Collagen is typically composed of a triple helix and generally contains high hydroxyproline content. The most common motifs in its amino acid sequence glycine-proline-X and glycine-X-hydroxyproline, where X is any amino acid other than glycine, proline or hydroxyproline. 28 types of collagen have been identified and described in the literature, which are all presently contemplated to be suitable for implementing embodiments of the invention. The five most common types are: Collagen I which may be found in skin, tendon, vascular ligature, organs, bone (main component of the organic part of bone); Collagen II which may be found in cartilage (main component of cartilage); Collagen III which may be found in reticulate (main component of reticular fibers); Collagen IV which may be found in the basal lamina, the epithelium-secreted layer of the basement membrane; Collagen V which may be found on cell surfaces, hair and placenta. For example, in certain embodiments, suitable collagens for implementing embodiments of the present invention particularly include collagen type-I and type-IV. In one particular example, collagen, in particular collagen types I, II, III and XI, is used as a bioactive carrier in the meaning of the present disclosure in cartilage-related applications. In one particular example, collagen, in particular collagen types I and III, is used as a bioactive carrier in the meaning of the present disclosure in muscle-related applications, skin-related applications, and T/L-related applications. In one particular example, any type of collagen is used as a bioactive carrier in the meaning of the present disclosure in vascular, neuron, eye retina, renal, wound healing, hair, fertility and reproduction, lung, adipose-related applications.

[0662] In certain embodiments, said association, combination, linkage or connection between said GFR-binding compound and a bioactive carrier may occur via a bioactive carrier-affinity-containing group as defined herein.

### IV. Bioactive Carrier-Affinity-Containing Group

[0663] In certain embodiments, said GFR-binding compound as already defined herein is modified or functionalised with at least one bioactive carrier-affinity-containing group. Said at least one bioactive carrier-affinity-containing group provides said GFR-binding compound with an ability to, covalently or non-covalently, interact with, or be connected to, a bioactive carrier as defined herein (in particular, a biomaterial as defined herein).

[0664] In such embodiments where affinity is required via covalent interaction or binding, said bioactive carrier-affinity-containing group may be a thiol (SH)-containing group or a cysteine-containing group, in particular, a thiol (SH)-containing peptide or a cysteine-containing peptide. In such embodiments where affinity is required via covalent interaction or binding, said bioactive carrier-affinity-containing group may particularly be a cysteine.

[0665] In such embodiments where affinity is required via non-covalent interaction or binding, said bioactive carrier-affinity-containing group may comprise (or be) a peptide group such as any one of the peptide groups disclosed in US patent application No. 2008/0268015 A1, which is hereby incorporated by reference in its entirety. In particular, peptides containing amino acid sequences rich in large aromatic amino acid residues (aromatic amino acid-containing peptides or peptidomimetics) that include one or more of Phe, Trp, Tyr such as sequence number 1 to 45 described in US 2008/0268015 A1 are suitable as a biomaterial-affinity-containing fragment for implementing embodiments of the present invention. Said fragment may also be a peptide fragment such as any one of the peptide fragments disclosed in U.S. Pat. No. 6,818,620 B2, which is hereby incorporated by reference in its entirety. In particular, peptides of sequence number 1 to 7 described in U.S. Pat. No. 6,818,620 B2 are suitable as a biomaterial-affinity-containing fragment for implementing embodiments of the present invention. Thus, said biomaterial affinity-containing group may be a peptide with 3 to 25 amino acids comprising one or more of Phe, Trp or Tyr.

[0666] In one particular example, said bioactive carrier-affinity-containing group is a bioactive carrier high-affinity-containing group such as a biomaterial high-affinity-containing group.

[0667] In certain embodiments, said bioactive carrier-affinity-containing group has some affinity (preferably high affinity) with a given bioactive carrier (in particular, a biomaterial) such as collagen, apatite, titanium or any of those listed in e.g. US patent application No. 2008/0268015 A1, which is incorporated herein by reference. For instance, a group having some affinity with a biomaterial is any group capable to non-covalently interact/bind to a biomaterial with an affinity/specificity selected from at least 10%, at least 20%, at least 30%, at least 40%, at least 50%, at least 60%, at least 70%, at least 80%, at least 90%, at least 100%, at least 200%, at least 300%, at least 400%, at least 500%, or a higher percentage, with respect to an affinity where said group binds to an appropriate control such as, for example, a different material or surface, or a protein typically used for such comparisons such as bovine serum albumin. In one example, a biomaterial-affinity-containing group has a binding specificity that is characterized by a relative binding affinity as measured by an EC50 of 10 □M or less, and in certain embodiments, less than 1 □M. In certain embodiments, a relative affinity comprised between 1 pM and 100 □M, between 1 pM and 10 □M, or between 1 pM and 1 □M is particularly suitable. The EC50 is determined using any number of methods known in the art. In this case, the EC50 represents the concentration of fragment producing 50% of the maximal binding observed for that fragment in the assay.

[0668] In one particular example, said bioactive carrier-affinity-containing group is selected from the group consisting of GTPGP, which may preferably non-covalently interact with a bioactive carrier such as an apatite, and WWFWG, which may preferably non-covalently interact with a bioactive carrier such as a collagen.

[0669] In one particular example, said bioactive carrier-affinity-containing group is covalently or non-covalently (in particular, covalently) attached at an end (or extremity) of said GFR-binding compound.

### V. Modified Non-Cyclic GFR-Binding Compound

[0670] Thus, in one aspect, the present disclosure provides a pharmaceutical association or combination comprising a modified (non-cyclic) GFR-binding compound and a bioactive carrier, wherein said modified (non-cyclic) GFR-binding compound comprises a (non-cyclic) GFR-binding compound as defined in the present disclosure and a bioactive carrier-affinity-containing group also as defined herein.

[0671] For example, in certain embodiments, said modified GFR-binding compound comprises a GFR-binding compound as defined in the present disclosure and a bioactive carrier-affinity-containing group; wherein said bioactive carrier-affinity-containing group is selected from the group consisting of a thiol-containing group (in particular, a thiol-containing peptide), a cysteine-containing group (in particular, a cysteine-containing peptide and more particularly, a cysteine), and an aromatic amino acid-containing peptide or peptidomimetic.

[0672] For example, in certain embodiments, said modified GFR-binding compound comprises a GFR-binding compound and a bioactive carrier-affinity-containing group; wherein said GFR-binding compound is a peptide, a variant or analog thereof, or a peptidomimetic as defined herein, with (comprising, or exclusively consisting of, or constituted of) between 8-30 amino acids, in particular between 8-25 amino acids or between 8-22 amino acids, more particularly between 18-22 amino acids, even more particularly between 19-21 or 20, comprising a peptide with four amino acids (PEP1) selected from the group consisting of SAIS, SSLS, NAIS, SATS, SPIS, EPIS, SPIN, KPLS, EPLP, EPLT, SNIT, RSVK and RPVQ; wherein said bioactive carrier-affinity-containing group is selected from the group consisting of a thiol-containing group (in particular, a thiol-containing peptide), a cysteine-containing group (in particular, a cysteine-containing peptide and more particularly, a cysteine), and an aromatic amino acid-containing peptide or peptidomimetic.

[0673] For example, in certain embodiments, said modified GFR-binding compound comprises a GFR-binding compound and a bioactive carrier-affinity-containing group; wherein said GFR-binding compound is a peptide, a variant or analog thereof, or a peptidomimetic as defined herein, with (comprising, or exclusively consisting of, or constituted of) between 8-30 amino acids, in particular between 8-25 amino acids or between 8-22 amino acids, more particularly between 18-22 amino acids, even more particularly between 19-21 or 20, comprising a peptide with height amino acids of general formula (PEP12): PEP1-AA¹⁷-PEP11; wherein PEP1 is a peptide with four amino acids selected from the group consisting of SAIS, SSLS, NAIS, SATS, SPIS, EPIS, SPIN, KPLS, EPLP, EPLT, SNIT, RSVK and RPVQ; wherein PEP11 is a peptide with 3 amino acids of formula AA¹⁸-AA¹⁹-AA²⁰; wherein AA¹⁷ is selected from the group consisting of G, A, V, L, I, P, F, M, W, T and S (in particular is selected from the group consisting of M, I, L, V and T); wherein AA¹⁸ is selected from the group consisting of L, V, Q, A and R; wherein AA¹⁹ is selected from the group consisting of F, W, H and Y (in particular is an aromatic, polar amino acid such as Y); wherein AA²⁰ is selected from the group consisting of L, F, Y, K, I, V and M; wherein said bioactive carrier-affinity-containing group is selected from the group consisting of a thiol-containing group (in particular, a thiol-containing peptide), a cysteine-containing group (in particular, a cysteine-containing peptide and more particularly, a cysteine), and an aromatic amino acid-containing peptide or peptidomimetic.

[0674] For example, in certain embodiments, said modified GFR-binding compound comprises a GFR-binding compound and a bioactive carrier-affinity-containing group; wherein said GFR-binding compound is a peptide, a variant or analog thereof, or a peptidomimetic as defined herein, with (comprising, or exclusively consisting of, or constituted of) between 8 and 30 (in particular between 8-25 or between 8-22, more particularly between 18-22, even more particularly between 19-21 or 20) amino acids, having the following general formula (I) (hereinafter may also be referred to as compound (I) or peptide (I)):

PEP(C)-PEP12 (I)

[0675] wherein PEP12 is a peptide with 8 amino acids of formula PEP1-AA¹⁷-PEP11 as defined herein; wherein one end of PEP(C) interacts covalently with PEP12 via one end of PEP1; wherein PEP(C) is a peptide with at least 5 amino acids, in particular a peptide with between 5 and 12 amino acids; wherein said bioactive carrier-affinity-containing group is selected from the group consisting of a thiol-containing group (in particular, a thiol-containing peptide), a cysteine-containing group (in particular, a cysteine-containing peptide and more particularly, a cysteine), and an aromatic amino acid-containing peptide or peptidomimetic.

[0676] For example, in certain embodiments, said modified GFR-binding compound comprises a GFR-binding compound and a bioactive carrier-affinity-containing group; wherein said GFR-binding compound is a peptide, a variant or analog thereof, or a peptidomimetic as defined herein, with (comprising, or exclusively consisting of, or constituted of) between 8 and 30 (in particular between 8-25 or between 8-22, more particularly between 18-22, even more particularly between 19-21 or 20) amino acids, having the following general formula (II) (hereinafter may also be referred to as compound (II) or peptide (II)):

PEP7-PEP5-PEP12 (II)

[0677] wherein PEP12 is a peptide with 8 amino acids of formula PEP1-AA¹⁷-PEP11 as defined herein; wherein PEP5 is a peptide with five amino acids as defined herein; wherein PEP7 is an amino acid or a peptide with between two and seven amino acids as defined herein; wherein one end of PEP5 interacts covalently with one end of PEP12 via one end of PEP1; wherein another end of PEP5 interacts covalently with one end of PEP7 via AA⁷; wherein said bioactive carrier-affinity-containing group is selected from the group consisting of a thiol-containing group (in particular, a thiol-containing peptide), a cysteine-containing group (in particular, a cysteine-containing peptide and more particularly, a cysteine), and an aromatic amino acid-containing peptide or peptidomimetic.

[0678] For example, in certain embodiments, said modified GFR-binding compound comprises a GFR-binding compound and a bioactive carrier-affinity-containing group; wherein said GFR-binding compound is a peptide, a variant or analog thereof, or a peptidomimetic as defined herein, with (comprising, or exclusively consisting of, or constituted of) between 8 and 30 (in particular between 8-25 or between 8-22, more particularly between 18-22, even more particularly between 19-21 or 20) amino acids, having the following general formula (III) (hereinafter may also be referred to as compound (III) or peptide (III)):

AA¹-AA²-AA³-AA⁴-AA⁵-AA⁶-AA⁷-AA⁸-AA⁹-AA²⁰-AA¹¹-AA¹²-AA¹³-AA¹⁴-AA¹⁵-AA¹⁶-AA¹⁷-AA¹⁸-AA¹⁹-AA²⁰ (III)

[0679] wherein AA¹-AA²-AA³-AA⁴-AA⁵-AA⁶-AA⁷ is PEP7 as defined herein; wherein AA¹³-AA¹⁴-AA¹⁵-AA¹⁶-AA¹⁷-AA¹⁸-AA¹⁹-AA²⁰ is PEP12 as defined herein; wherein AA⁸-AA⁹-AA¹⁰ is PEP3 as defined herein; wherein AA¹ and AA¹² are as defined herein; wherein AA¹ may be an N-terminal amino acid or a C-terminal amino acid; wherein AA²⁰ may be an N-terminal amino acid or a C-terminal amino acid; wherein said bioactive carrier-affinity-containing group is selected from the group consisting of a thiol-containing group (in particular, a thiol-containing peptide), a cysteine-containing group (in particular, a cysteine-containing peptide and more particularly, a cysteine), and an aromatic amino acid-containing peptide or peptidomimetic.

[0680] In certain embodiments, said modified GFR-binding compound comprises a GFR-binding compound and a bioactive carrier-affinity-containing group; wherein the RMSD value of the three dimensional (3D) atomic coordinates of said GFR-binding compound with respect to PEPREF is 2.45 Å (Angstroms) or less, in particular is 2 Å or less, and more particularly is 1.79 Å or less, and wherein PEPREF is the set of 3D atomic coordinates already defined herein.

### VI. Modified Cyclic GFR-Binding Compound

[0681] Thus, in one aspect, the present disclosure provides a pharmaceutical association or combination comprising a modified cyclic GFR-binding compound and a bioactive carrier, wherein said modified cyclic GFR-binding compound comprises a cyclic GFR-binding compound as defined in the present disclosure and a bioactive carrier-affinity-containing group also as defined herein.

[0682] For example, in certain embodiments, said modified cyclic GFR-binding compound comprises a cyclic GFR-binding compound as defined in the present disclosure and a bioactive carrier-affinity-containing group; wherein said bioactive carrier-affinity-containing group is selected from the group consisting of a thiol-containing group (in particular, a thiol-containing peptide), a cysteine-containing group (in particular, a cysteine-containing peptide and more particularly, a cysteine), and an aromatic amino acid-containing peptide or peptidomimetic.

[0683] For example, in certain embodiments, the present disclosure provides a modified cyclic GFR-binding compound comprising a cyclic GFR-binding compound and a bioactive carrier-affinity-containing group; wherein said cyclic GFR-binding compound is a cyclic peptide, a variant or analog thereof, or a cyclic peptidomimetic as defined herein, with (comprising, or exclusively consisting of, or constituted of) between 10-60 (in particular between 15-60, more particularly between 10-55, and even more particularly between 15-55) amino acids or with between 10-35 (in particular between 15-35, more particularly between 10-30, and even more particularly between 15-30) amino acids; comprising a peptide with four amino acids (PEP1) selected from the group consisting of SAIS, SSLS, NAIS, SATS, SPIS, EPIS, SPIN, KPLS, EPLP, EPLT, SNIT, RSVK and RPVQ; wherein said bioactive carrier-affinity-containing group is selected from the group consisting of a thiol-containing group (in particular, a thiol-containing peptide), a cysteine-containing group (in particular, a cysteine-containing peptide and more particularly, a cysteine), and an aromatic amino acid-containing peptide or peptidomimetic.

[0684] For example, in certain embodiments, the present disclosure provides a modified cyclic GFR-binding compound comprising a cyclic GFR-binding compound and a bioactive carrier-affinity-containing group; wherein said cyclic GFR-binding compound is a cyclic peptide, a variant or analog thereof, or a cyclic peptidomimetic as defined herein, with (comprising, or exclusively consisting of, or constituted of) between 10-60 (in particular between 15-60, more particularly between 10-55, and even more particularly between 15-55) amino acids or with between 10-35 (in particular between 15-35, more particularly between 10-30, and even more particularly between 15-30) amino acids; comprising a peptide with height amino acids of general formula (PEP12): PEP1-AA¹⁷-PEP11; wherein PEP1 is a peptide with four amino acids selected from the group consisting of SAIS, SSLS, NAIS, SATS, SPIS, EPIS, SPIN, KPLS, EPLP, EPLT, SNIT, RSVK and RPVQ; wherein PEP11 is a peptide with 3 amino acids of formula AA¹⁸-AA¹⁹-AA²⁰; wherein AA¹⁷ is selected from the group consisting of G, A, V, L, I, P, F, M, W, T and S (in particular is selected from the group consisting of M, I, L, V and T); wherein AA¹⁸ is selected from the group consisting of L, V, Q, A and R; wherein AA¹⁹ is selected from the group consisting of F, W, H and Y (in particular is an aromatic, polar amino acid such as Y); wherein AA²⁰ is selected from the group consisting of L, F, Y, K, I, V and M; wherein said bioactive carrier-affinity-containing group is selected from the group consisting of a thiol-containing group (in particular, a thiol-containing peptide), a cysteine-containing group (in particular, a cysteine-containing peptide and more particularly, a cysteine), and an aromatic amino acid-containing peptide or peptidomimetic.

[0685] For example, in certain embodiments, the present disclosure provides a modified cyclic GFR-binding compound comprising a cyclic GFR-binding compound and a bioactive carrier-affinity-containing group, wherein said cyclic GFR-binding compound is a cyclic peptide, a variant or analog thereof, or a cyclic peptidomimetic as defined herein, with between 10-60 (in particular between 15-60, more particularly between 10-55, and even more particularly between 15-55) amino acids or with between 10-35 (in particular between 15-35, more particularly between 10-30, and even more particularly between 15-30) amino acids, comprising a peptide, a variant or analog thereof, or a peptidomimetic having the following general formula (IIIa):

PEP(A)-LINKER (IIIa)

[0686] wherein one end of LINKER interacts covalently with one end of PEP(A); wherein PEP(A) comprises PEP1 or PEP12; wherein LINKER is a linear or branched organic divalent radical, moiety or compound having a molecular weight (Mw) comprised between 450 and 4,500 Daltons, in particular comprised between about 600 and about 4,500 Da, more particularly between about 600 and about 4,000 Da, and even more particularly between about 600 and about 3,500 Da; wherein said bioactive carrier-affinity-containing group is selected from the group consisting of a thiol-containing group (in particular, a thiol-containing peptide), a cysteine-containing group (in particular, a cysteine-containing peptide and more particularly, a cysteine), and an aromatic amino acid-containing peptide or peptidomimetic.

[0687] For example, in certain embodiments, the present disclosure provides a modified cyclic GFR-binding compound comprising a cyclic GFR-binding compound and a bioactive carrier-affinity-containing group, wherein said cyclic GFR-binding compound is a cyclic peptide, a variant or analog thereof, or a cyclic peptidomimetic as defined herein, with between 10-60 (in particular between 15-60, more particularly between 10-55, and even more particularly between 15-55) amino acids or with between 10-35 (in particular between 15-35, more particularly between 10-30, and even more particularly between 15-30) amino acids, comprising a peptide, a variant or analog thereof, or a peptidomimetic having the following general formula (IIIb):

LINKER-PEP(A)-LINKER (IIIb)

[0688] wherein one end of a first LINKER interacts covalently with one end of PEP(A); wherein one end of a second LINKER interacts covalently with another end of PEP(A); wherein another end of a first LINKER interacts covalently with another end of a second LINKER; wherein PEP(A) comprises PEP1 or PEP12; wherein LINKER are independently a linear or branched organic divalent radical, moiety or compound having a molecular weight (Mw) comprised between 450 and 4,500 Daltons, in particular comprised between about 600 and about 4,500 Da, more particularly between about 600 and about 4,000 Da, and even more particularly between about 600 and about 3,500 Da; and wherein said bioactive carrier-affinity-containing group is selected from the group consisting of a thiol-containing group (in particular, a thiol-containing peptide), a cysteine-containing group (in particular, a cysteine-containing peptide and more particularly, a cysteine), and an aromatic amino acid-containing peptide or peptidomimetic.

[0689] For example, in certain embodiments, the present disclosure provides a modified cyclic GFR-binding compound comprising a cyclic GFR-binding compound and a bioactive carrier-affinity-containing group; wherein said cyclic GFR-binding compound is a cyclic peptide, a variant or analog thereof, or a cyclic peptidomimetic as defined herein, with between 10-35 (in particular between 15-35, more particularly between 10-30, and even more particularly between 15-30) amino acids, comprising a peptide, a variant or analog thereof, or a peptidomimetic having the following general formula (IVa):

PEP(C)-PEP12-LINKER (IVa)

[0690] wherein LINKER is a linear or branched organic divalent radical, moiety or compound having a molecular weight (Mw) comprised between 450 and 4,500 Daltons, in particular comprised between about 600 and about 4,500 Da, more particularly between about 600 and about 4,000 Da, and even more particularly between about 600 and about 3,500 Da; wherein PEP12 is a peptide with 8 amino acids of formula PEP1-AA¹⁷-PEP11 as defined herein; wherein PEP2 is a peptide with five amino acids as already defined herein; wherein one end of PEP(C) interacts covalently with PEP12 via one end of PEP1; wherein one end of LINKER interacts covalently with one end of PEP12 via one end of PEP11; wherein PEP(C) is a peptide with at least 5 amino acids, in particular a peptide with between 5 and 12 amino acids; and wherein said bioactive carrier-affinity-containing group is selected from the group consisting of a thiol-containing group (in particular, a thiol-containing peptide), a cysteine-containing group (in particular, a cysteine-containing peptide and more particularly, a cysteine), and an aromatic amino acid-containing peptide or peptidomimetic.

[0691] For example, in certain embodiments, the present disclosure provides a modified cyclic GFR-binding compound comprising a cyclic GFR-binding compound and a bioactive carrier-affinity-containing group; wherein said cyclic GFR-binding compound is a cyclic peptide, a variant or analog thereof, or a cyclic peptidomimetic as defined herein, with between 10-60 (in particular between 15-60, more particularly between 10-55, and even more particularly between 15-55) amino acids or with between 10-35 (in particular between 15-35, more particularly between 10-30, and even more particularly between 15-30) amino acids, comprising a peptide, a variant or analog thereof, or a peptidomimetic having the following general formula (IVb):

LINKER-PEP(C)-PEP12-LINKER (IVb)

[0692] wherein LINKER are independently a linear or branched organic divalent radical, moiety or compound having a molecular weight (Mw) comprised between 450 and 4,500 Daltons, in particular comprised between about 600 and about 4,500 Da, more particularly between about 600 and about 4,000 Da, and even more particularly between about 600 and about 3,500 Da; wherein PEP12 is a peptide with 8 amino acids of formula PEP1-AA¹⁷-PEP11 as defined herein; wherein PEP2 is a peptide with five amino acids as already defined herein; wherein one end of PEP(C) interacts covalently with PEP12 via one end of PEP1; wherein one end of a first LINKER interacts covalently with one end of PEP12 via one end of PEP11; wherein one end of a second LINKER interacts covalently with another end of PEP(C); wherein another end of a first LINKER interacts covalently with another end of a second LINKER; wherein PEP(C) is a peptide with at least 5 amino acids, in particular a peptide with between 5 and 12 amino acids; and wherein said bioactive carrier-affinity-containing group is selected from the group consisting of a thiol-containing group (in particular, a thiol-containing peptide), a cysteine-containing group (in particular, a cysteine-containing peptide and more particularly, a cysteine), and an aromatic amino acid-containing peptide or peptidomimetic.

[0693] For example, in certain embodiments, the present disclosure provides a modified cyclic GFR-binding compound comprising a cyclic GFR-binding compound and a bioactive carrier-affinity-containing group, wherein said cyclic GFR-binding compound is a cyclic peptide, a variant or analog thereof, or a cyclic peptidomimetic as defined herein, with between 10-35 (in particular between 15-35, more particularly between 10-30, and even more particularly between 15-30) amino acids, comprising a peptide, a variant or analog thereof, or a peptidomimetic having the following general formula (Va):

PEP7-PEP5-PEP12-LINKER (Va)

[0694] wherein LINKER is a linear or branched organic divalent radical, moiety or compound having a molecular weight (Mw) comprised between 450 and 4,500 Daltons, in particular comprised between about 600 and about 4,500 Da, more particularly between about 600 and about 4,000 Da, and even more particularly between about 600 and about 3,500 Da; wherein PEP12 is a peptide with 8 amino acids of formula PEP1-AA¹⁷-PEP11 as defined herein; wherein PEP5 is a peptide with five amino acids as already defined herein; wherein PEP7 an amino acid or a peptide with between two and seven amino acids as already defined herein; wherein one end of LINKER interacts covalently with one end of PEP12 via AA²⁰; wherein one end of PEP5 interacts covalently with another end of PEP12 via AA¹²; wherein another end of PEP5 interacts covalently with one end of PEP7 via AA⁸; and wherein said bioactive carrier-affinity-containing group is selected from the group consisting of a thiol-containing group (in particular, a thiol-containing peptide), a cysteine-containing group (in particular, a cysteine-containing peptide and more particularly, a cysteine), and an aromatic amino acid-containing peptide or peptidomimetic.

[0695] For example, in certain embodiments, the present disclosure provides a modified cyclic GFR-binding compound comprising a cyclic GFR-binding compound and a bioactive carrier-affinity-containing group, wherein said cyclic GFR-binding compound is a cyclic peptide, a variant or analog thereof, or a cyclic peptidomimetic as defined herein, with between 10-60 (in particular between 15-60, more particularly between 10-55, and even more particularly between 15-55) amino acids or with between 10-35 (in particular between 15-35, more particularly between 10-30, and even more particularly between 15-30) amino acids, comprising a peptide, a variant or analog thereof, or a peptidomimetic having the following general formula (Vb):

LINKER-PEP7-PEP5-PEP12-LINKER (Vb)

[0696] wherein LINKER are independently a linear or branched organic divalent radical, moiety or compound having a molecular weight (Mw) comprised between 450 and 4,500 Daltons, in particular comprised between about 600 and about 4,500 Da, more particularly between about 600 and about 4,000 Da, and even more particularly between about 600 and about 3,500 Da; wherein PEP12 is a peptide with 8 amino acids of formula PEP1-AA¹⁷-PEP11 as defined herein; wherein PEP5 is a peptide with five amino acids as already defined herein; wherein PEP7 an amino acid or a peptide with between two and seven amino acids as already defined herein; wherein one end of PEP5 interacts covalently with another end of PEP12 via AA¹²; wherein another end of PEP5 interacts covalently with one end of PEP7 via AA⁸; wherein one end of a first LINKER interacts covalently with one end of PEP12 via AA²⁰; wherein one end of a second LINKER interacts covalently with another end of PEP7; wherein another end of a first LINKER interacts covalently with another end of a second LINKER; and wherein said bioactive carrier-affinity-containing group is selected from the group consisting of a thiol-containing group (in particular, a thiol-containing peptide), a cysteine-containing group (in particular, a cysteine-containing peptide and more particularly, a cysteine), and an aromatic amino acid-containing peptide or peptidomimetic.

[0697] For example, in certain embodiments, the present disclosure provides a modified cyclic GFR-binding compound comprising a cyclic GFR-binding compound and a bioactive carrier-affinity-containing group, wherein said cyclic GFR-binding compound is a cyclic peptide, a variant or analog thereof, or a cyclic peptidomimetic as defined herein, with between 10-35 (in particular between 15-35, more particularly between 10-30, and even more particularly between 15-30) amino acids, comprising a peptide, a variant or analog thereof, or a peptidomimetic having the following general formula (VIa):

AA¹-AA²-AA³-AA⁴-AA⁵-AA⁶-AA⁷-AA⁸-AA⁹-AA¹⁰-AA¹¹-AA¹²-AA¹³-AA¹⁴-AA¹⁵-AA¹⁶-AA¹⁷-AA¹⁸-AA¹⁹-AA²⁰-LINKER (VIa)

[0698] wherein LINKER is a linear or branched organic divalent radical, moiety or compound having a molecular weight (Mw) comprised between 450 and 4,500 Daltons, in particular comprised between about 600 and about 4,500 Da, more particularly between about 600 and about 4,000 Da, and even more particularly between about 600 and about 3,500 Da; wherein AA¹-AA²-AA³-AA⁴-AA⁵-AA⁶-AA⁷ is PEP7 as defined herein; wherein AA¹³-AA¹⁴-AA¹⁵-AA¹⁶-AA¹⁷-AA¹⁸-AA¹⁹-AA²⁰ is PEP12 as defined herein; wherein AA⁸-AA⁹-AA¹⁰ is PEP3 as defined herein; wherein AA¹ and AA¹² are as defined herein; wherein one end of LINKER interacts covalently with AA²⁰; wherein AA¹ may be an N-terminal amino acid or a C-terminal amino acid; wherein AA²⁰ may be an N-terminal amino acid or a C-terminal amino acid; and wherein said bioactive carrier-affinity-containing group is selected from the group consisting of a thiol-containing group (in particular, a thiol-containing peptide), a cysteine-containing group (in particular, a cysteine-containing peptide and more particularly, a cysteine), and an aromatic amino acid-containing peptide or peptidomimetic.

[0699] For example, in certain embodiments, the present disclosure provides a modified cyclic GFR-binding compound comprising a cyclic GFR-binding compound and a bioactive carrier-affinity-containing group, wherein said cyclic GFR-binding compound is a cyclic peptide, a variant or analog thereof, or a cyclic peptidomimetic as defined herein, with between 10-60 (in particular between 15-60, more particularly between 10-55, and even more particularly between 15-55) amino acids or with between 10-35 (in particular between 15-35, more particularly between 10-30, and even more particularly between 15-30) amino acids, comprising a peptide, a variant or analog thereof, or a peptidomimetic having the following general formula (VIb) (hereinafter may also be referred to as compound (VIb) or peptide (VIb)):

LINKER-AA¹-AA²-AA³-AA⁴-AA⁵-AA⁶-AA⁷-AA⁸-AA⁹-AA¹⁰-AA¹¹-AA¹²-AA¹³-AA¹⁴-AA¹⁵-AA¹⁶-AA¹⁷-AA¹⁸-AA¹⁹-AA²⁰-LINKER (VIb)

[0700] wherein LINKER are independently a linear or branched organic divalent radical, moiety or compound having a molecular weight (Mw) comprised between 450 and 4,500 Daltons, in particular comprised between about 600 and about 4,500 Da, more particularly between about 600 and about 4,000 Da, and even more particularly between about 600 and about 3,500 Da; wherein AA¹-AA²-AA³-AA⁴-AA⁵-AA⁶-AA⁷ is PEP7 as defined herein; wherein AA¹³-AA¹⁴-AA¹⁵-AA¹⁶-AA¹⁷-AA¹⁸-AA¹⁹-AA²⁰ is PEP12 as defined herein; wherein AA⁸-AA⁹-AA¹⁰ is PEP3 as defined herein; wherein AA¹¹ and AA¹² are as defined herein; wherein one end of a first LINKER interacts covalently with AA²⁰; wherein one end of a second LINKER interacts covalently with AA¹; wherein another end of a first LINKER interacts covalently with another end of a second LINKER; wherein one end of the first LINKER may be an N-terminal amino acid or a C-terminal amino acid; and wherein said bioactive carrier-affinity-containing group is selected from the group consisting of a thiol-containing group (in particular, a thiol-containing peptide), a cysteine-containing group (in particular, a cysteine-containing peptide and more particularly, a cysteine), and an aromatic amino acid-containing peptide or peptidomimetic.

[0701] In one particular example, said bioactive carrier-affinity-containing group is comprised within said cyclic GFR-binding compound e.g. is comprised in at least one LINKER, or is at least one LINKER. For example, in certain embodiments, said modified cyclic GFR-binding compound may have any one of the following general schematic formulae:

[chemical structure]

[chemical structure]

[0702] wherein curved lines represents covalent bonds between LINKER, PEP3, PEP5, PEP12 and AAs “boxes”. Curved lines' lengths may not be representative of the actual relative distance between the LINKER, PEP3,AA PEP5, PEP12 and AAs.

### VII. Pharmaceutical Associations or Combinations

[0703] In one aspect, the present disclosure provides a pharmaceutical association or combination, which may be used for converting or recoding, in-vitro, ex-vivo or in-vivo, a neoplastic cell into a non-neoplastic cell, comprising at least one (modified) GFR-binding compound and a bioactive carrier, both as defined in the present disclosure. In one example, said (modified) GFR-binding compound and bioactive carrier are both active principles/ingredients. In one example, said GFR-binding compound and bioactive carrier are functionally associated/combined as defined herein. In certain embodiments, said pharmaceutical association or combination is a modified, functionalised, coated or grafted biomaterial as defined herein.

[0704] The present pharmaceutical associations or combinations may thus also be used for protecting a subject carrying a neoplastic cell from a neoplastic disease.

[0705] In one aspect, the present disclosure provides a pharmaceutical association or combination for the uses disclosed herein, substantially free from any cell adhesion promoter. As used herein, the term “substantially free”, as applied to a given component such as a cell adhesion promoter, means that the amount of such a component is less than 20%, 15%, 10%, 5%, 1%, 0.5%, 0.1% or less in mole with respect to the mole content of (modified) GFR-binding compound unless otherwise indicated, self-evident or contradictory in context.

[0706] In one aspect, the present disclosure provides a pharmaceutical association as defined herein further comprising (another) anti-cancer agent thus forming a pharmaceutical composition of the invention. In one example, said pharmaceutical composition further comprises at least one pharmaceutically acceptable excipient. In one example, said further anti-cancer agent is functionally associated with said GFR-binding compound and/or said bioactive carrier. Suitable further anti-cancer agents include but are not limited to, agents that inhibit the synthesis of DNA molecule building blocks, agents that directly damage DNA in the cell nucleus, agents that affect the synthesis or breakdown of mitotic spindles, and agents that inhibit kinase proteins by interacting with the kinase active site. Preferred examples of agents that inhibit the synthesis of DNA molecule building blocks include, but are not limited to, methotrexate (Abitrexate®), fluorouracil (Adrucil®), gemcitabine (Gemzar®), arabinosylcytosine (araC), hydroxyurea (Hydrea®), and mercaptopurine (Purinethol®). Preferred examples of agents that directly damage DNA in the cell nucleus include, but are not limited to, carboplatin (Paraplatin® and paraplatin-AQ®), cisplatin (Platinol®) and antibiotics such as daunorubicin (Cerubidine®), doxorubicin (Adriamycin®), and etoposide (VePesid®). Preferred examples of agents that affect the synthesis or breakdown of mitotic spindles include, but are not limited to, miotic disrupters such as Vinblastine (Velban®), Vincristine (Oncovin®) and Pacitaxel (Taxol®). Preferred examples of agents that inhibit kinase proteins include, but are not limited to, Afatinib®, Axitinib®, Bosulif®, Bosutinib®, Cabozantinib®, Caprelsa®, Cometriq®, Crizotinib®, Dasatinib®, Erlotinib®, Gilotrif®, Gleevec®, Ibrutinib®, Iclusig®, Imatinib®, Imbruvica®, Inlyta®, Lapatinib®, Nexavar®, Nilotinib®, Pazopanib®, Ponatinib®, Regorafenib®, Sorafenib®, Sprycel®, Stivarga®, Sunitinib®, Sutent®, Tarceva®, Tasigna®, Tivopath®, Tivozanib®, Tykerb®, Vandetanib®, Votrient®, Xalkori®, Zaltrap®, and Ziv-aflibercept®.

[0707] In one example, the L-asparaginase enzyme may also be used as a further agent in combination with the pharmaceutical association or composition as defined herein. L-asparaginase enzyme has been reported e.g. in L-Asparaginase: A Promising Enzyme for Treatment of Acute Lymphoblastic Leukiemia, People's Journal of Scientific Research, Vol. 5(1), January 2012, which is incorporated herein by reference in its entirety, to act by depriving cancer cells (such as leukemia cells) of asparagine thus inducing their death.

[0708] Other anti-cancer agents may also be used such as nitrogen mustards, ethylenimes, alkylsulfonates, triazenes, piperazines, nitrosureas and antibiotics such as anthracyclines, dactinomycin, bleomycin, adriamycin, or mithramycin.

[0709] In one aspect, the present disclosure provides a pharmaceutical association as defined herein further comprising an adhesion protein inhibitor thus forming a pharmaceutical composition of the invention. In one example, said pharmaceutical composition further comprises at least one pharmaceutically acceptable excipient. In one example, said adhesion protein inhibitor is functionally associated with said GFR-binding compound and/or said bioactive carrier. Suitable adhesion protein inhibitors include, but are not limited to, siRNA, mRNA or microRNAs which inhibits or down-regulates the gene or protein expression of at least one integrin, syndecan, selectin or dystroglycan, anti-integrin antibodies, anti-syndecan antibodies, anti-selectin antibodies, anti-dystroglycan antibodies, foldamers, or dendrimers.

[0710] In one example, said pharmaceutical association or combination comprises one (modified) GFR-binding compound. In one example, said pharmaceutical association or combination comprises two or more distinct (modified) GFR-binding compounds. In one example, said pharmaceutical association or combination comprises three or more distinct (modified) GFR-binding compounds. In one example, said pharmaceutical association or combination comprises four or more distinct (modified) GFR-binding compounds.

[0711] In one aspect, the present disclosure provides a process or method for manufacturing a neoplastic disease medicament, said process comprising associating or combining at least one bioactive carrier with at least one (modified) GFR-binding compound both as defined herein. Said step of associating or combining a bioactive carrier with a (modified) GFR-binding compound may be carried out using a method as already described above.

[0712] In one aspect, the present disclosure provides a process or method for manufacturing a neoplastic disease medicament precursor, said process comprising providing at least one (modified) GFR-binding compound and/or at least one bioactive carrier both as defined herein, wherein providing said bioactive carrier and/or said (modified) GFR-binding compound manufactures said neoplastic disease medicament.

[0713] In certain aspects, said pharmaceutical association or composition substantially down-regulates, reduces, inhibits or suppresses the gene and/or protein expression of at least one of cyclin-D1, cyclin-D2 or cyclin-D3. Because cyclins D1, D2 and D3 regulate the activity of Cyclin-dependent kinases (CDKs) 4 and 6 by forming cyclin-CDK protein complexes including Cyclin D1-CDK4 complex, Cyclin D1-CDK6 complex, Cyclin D2-CDK4 complex, Cyclin D2-CDK6 complex, Cyclin D3-CDK4 complex and Cyclin D3-CDK6 complex, said pharmaceutical association or composition was also observed to substantially reduce, inhibit, suppress or destabilise the formation of any one of such complexes.

[0714] There are many ways to test, measure and represent the inhibitory effect of a given substance on the gene or protein expression of cyclins D, but for the purpose of the present disclosure, and for the avoidance of any doubts, the inhibition values of a given pharmaceutical association or composition as defined herein is a measure of the gene expression of cyclins D as provided by RT-PCR. It is to be understood that the values of the gene expression of cyclins D disclosed herein correspond to the total gene expression of all cyclins D present in the tested cell i.e. D1, D2 and D3 as known at the date of the present disclosure.

[0715] As already stated above, pharmaceutical associations or compositions suitable for implementing embodiments of the present invention reduce the gene expression of cyclins D by at least 20% during at least one part of the G1 phase of the cell cycle as compared to the wild-type expression. The absolute and relative duration of each cell cycle phase (in other words, the cell cycle duration profile) usually varies (some phases such as the Gap phases may “shrink”) amongst healthy cells of different types (e.g. bone cells, skin cells, etc. . . . ) and between healthy cells and neoplastic cells of the same type (e.g. healthy bone cells and neoplastic bone cells). Typical average cell cycle duration is commonly accepted to be about 24 hours. Typically accepted phase durations for a healthy cell are 11 to 14 hours for the G1 phase, 5 to 12 hours for the S phase, 3 to 12 hours for the G2 phase and about 1 hour for the M phase. In neoplastic cells, such as in cancer cells, it is commonly admitted that, although the duration of the S and M phases may generally be conserved, the length of the G1 and G2 phases is generally shortened in order to increase cell division. Cell cycle phase's duration may thus vary significantly from one cell type to another. Consequently, conventionally and for the purpose of facilitating the comparative representation of the inhibition of the gene expression of cyclins D for different cell types, the gene expression is represented as a function of the cell cycle progression (starting from G1 and finishing with M) and not as a direct function of time.

[0716] Active or Bioactive Principles or Ingredients:

[0717] In the present description and unless otherwise indicated or contradictory in context, the term “(bio)active principle” or “(bio)active ingredient” generally refers to a molecule, compound or substance which is responsible for providing the desired biological effect. Without said active ingredient, the formulation or composition containing it, would not provide the desired biological effect. For example, in certain embodiments, formulation excipients are not considered as active ingredients in the pharmaceutical composition as defined herein.

[0718] In one example, said (modified) GFR-binding compound and bioactive carrier are both active principles/ingredients.

[0719] In one aspect, the present disclosure also provides a GFR-binding compound modified to be associated with a bioactive carrier (i.e. a modified GFR-binding compound) to form a pharmaceutical association all as defined herein, for use in the prevention or treatment of a neoplastic disease.

[0720] Neoplastic Disease Medicament:

[0721] In the present description and unless otherwise indicated or contradictory in context, the term “neoplastic disease medicament” means a substance, compound, pharmaceutical association, combination, composition or formulation which is suitable for treating or preventing a neoplastic disease in a subject.

[0722] Subject Carrying a Neoplastic Cell:

[0723] In the present description and unless otherwise indicated or contradictory in context, the term “subject carrying a neoplastic cell” means that at least one cell constitutive of the subject is a neoplastic cell as defined herein.

[0724] In the present description and unless otherwise indicated or contradictory in context, the terms “functionally associated”, “functionally combined”, “functionalized”, “immobilized”, “deposited”, “coated”, or “grafted” all refer to the action of associating or functionalising at least one part of a bioactive carrier with a (modified) GFR-binding compound so that the desired biological, therapeutic and/or cosmetic effect e.g. inducing tissue formation, is obtained. The association or combination may be covalent and form, between said (modified) GFR-binding compound and said bioactive carrier, a covalent interaction as already defined herein, or, the association or combination may be non-covalent and form, between said (modified) GFR-binding compound and said bioactive carrier, a non-covalent interaction as already defined herein.

[0725] For example, in certain embodiments, a (modified) GFR-binding compound interacts covalently (makes at least one functional covalent interaction) with said bioactive carrier.

[0726] In one aspect, the present disclosure thus provides a pharmaceutical association or combination comprising a (modified) GFR-binding compound and a bioactive carrier for use in converting or recoding a neoplastic cell into a non-neoplastic cell, wherein said GFR-binding compound (before any modifications) and said bioactive carrier are both as defined herein.

[0727] In one particular example, said pharmaceutical association or combination comprises at least one GFR-binding compound selected from the group consisting of peptides of SEQ ID NO: 1 to 13564.

[0728] The present disclosure provides a pharmaceutical association or combination comprising a (modified) GFR-binding compound, wherein all of PEP1, PEP3, PEP5, PEP9, PEP11, PEP12, AA¹⁷, pairs and triplets thereof, disclaimers and provisos, are as already defined herein.

[0729] Suitable covalent association or functionalization techniques for implementing embodiments of the present invention include, but are not limited to, reductive amination coupling or photo-grafting such as described in H. Freichel et al., Macromol. Rapid Commun. 2011, 32, 616-621 and V. Pourcelle et al., Biomacromol. 2009, 10, 966-974, the content of which is hereby incorporated by reference in its entirety.

[0730] In one aspect, the present disclosure provides a production method or process useful for producing a

[chemical structure]

pharmaceutical association or combination according to the present disclosure wherein said bioactive carrier is a biomaterial such as a ceramic or a titanium, comprising, or exclusively consisting of, the contacting of a compound of formula (C—I) and a bioactive carrier as defined herein under suitable covalent-bond formation conditions thereby forming at least one covalent bond between said compound (C—I) and said bioactive carrier thus forming a pharmaceutical association or combination according to the present disclosure:

(C—I)

wherein X is Si; wherein Y is a divalent organic linker; wherein A is a (modified) GFR-binding compound according to the present disclosure, wherein R¹ and R² are both independently an organic spacing-compound other than a leaving group as defined herein, and wherein R³ is a leaving group as defined herein;

[0731] In one particular example, a process or method which may be used to functionally associate or combine a (modified) GFR-binding compound with a bioactive carrier such as a ceramic or a titanium is shown in Scheme 1:

[chemical structure]

[0732] Such syntheses involve the formation of a covalent interaction (or association) between a (modified) GFR-binding compound (represented as (A)-SH in Scheme 1) and a bioactive carrier as defined herein.

[0733] In one particular example, a process or method which may be used to functionally associate or combine a (modified) GFR-binding compound with a bioactive carrier is a method for covalent functionalization or depositing of a (modified) GFR-binding compound onto a polyetheretherketone polymer (PEEK) surface wherein (i) the polymer is treated with ethylene diamine (NH₂═NH₂) to create NH₂ functions on a PEEK surface from ketone (═O) functions and (ii) the hereby modified PEEK-NH₂ polymer is immersed in a solution of a chosen hetero-bifunctional cross-linker such as 3-succinimidyl-3-maleimidopropionate thereby reacting the maleimide group with a (modified) GFR-binding compound through e.g. a thiol group thereof.

[0734] In one particular example, a process or method which may be used to functionally associate or combine a (modified) GFR-binding compound with a bioactive carrier is a method for covalent functionalization or depositing of a (modified) GFR-binding compound onto a polylactic acid (PLLA) polymer wherein (i) the polymer is immersed in a solution containing, for instance, (dimethylaminopropyl)-3-ethylcarbodiimide hydrochloride+N-hydroxysuccinimide in (2-(N-morpholino)-ethanesulfonic acid and then (ii) rinsed using e.g. MilliQ water.

[0735] Leaving Groups:

[0736] As used herein, unless indicated otherwise or contradictory in context, the term “leaving group” means a molecular fragment which possesses the ability to depart with a pair of electrons in a heterolytic bond cleavage. Leaving groups are anions or neutral molecules and possess the ability to stabilize the additional electron density that results from bond heterolysis. Common anionic leaving groups are halogen atoms such as chlorine (Cl), bromine (Br), and iodine (I), which leaves as a chloride ion (Cl⁻), a bromide ion (Br⁻) and an iodide ion (I⁻), respectively. Other leaving groups include sulfonate esters, such as tosylate (TsO⁻). Conventional neutral molecule leaving groups are water and ammonia. Suitable as leaving groups for implementing embodiments of the invention preferably include the group consisting of a halogen, a substituted or unsubstituted alkoxy group (—OR), a substituted or unsubstituted aryloxy or heteroaryloxy group (—OAr), a substituted or unsubstituted alkylcarbonyloxy group (—O₂CR), a substituted or unsubstituted arylcarbonyloxy or heteroarylcarbonyloxy group (—O₂CAr), a substituted or unsubstituted alkylsulfonyloxy group (—O₃SR), a substituted or unsubstituted arylsulfonyloxy or heteroarylsulfonyloxy group (—O₃SAr). Substituents of leaving groups include halogens, alkyl (preferably C1 to C5-alkyl) groups and alkoxy (preferably C1 to C5-alkoxy) groups.

[0737] Y Group

[0738] In the present disclosure, the Y group is not aimed at being particularly limited and any moiety comprising at least one atom and having the ability to covalently or non-covalently, preferably covalently, link or interact with the X and A groups as defined herein thereby providing a stable connection between an active substance A and the X group as defined herein, is, unless contradictory or non-adapted in context, suitable for implementing embodiments of the present disclosure and is comprised within the scope of the invention.

[0739] Thus, in the present description and unless otherwise indicated, the term “linker”, when used in relation to a Y group, means any organic moiety comprising at least one atom and having the ability to interact covalently or non-covalently with an active substance A and covalently interact with an X group as defined herein.

[0740] In one example, Y groups include divalent organic radicals selected from the group consisting of a saturated or unsaturated, preferably saturated, hydrocarbon chain comprising between 1 and 30 carbon atoms, wherein said hydrocarbon chain is optionally interrupted by one or more non-carbon atom, preferably between 1 and 16, between 1 and 12 or between 1 and 8 non-carbon atoms as appropriate, wherein said non-carbon atom is selected, for instance, from the group consisting of —O—, —S—, —C(═O), —SO₂—, —N(Ri)(C═O)—, —N(Ri)-, and the following radical:

[chemical structure]

[0741] wherein Ri is selected from the group consisting of a hydrogen atom, a C1-C6 alkyl group and a aryl group, and wherein said hydrocarbon chain is non-substituted or substituted, by at least one radical selected from the group consisting of a halogen, a hydroxyl group, a C1-C20 alkyl group and a aryl group.

[0742] Suitable as Y groups for implementing embodiments of the invention include saturated or unsaturated hydrocarbon chains comprising between 1 and 20 carbon atoms, saturated or unsaturated hydrocarbon chains comprising between 1 and 10 carbon atoms, saturated or unsaturated hydrocarbon chains comprising between 1 and 5 carbon atoms, saturated or unsaturated hydrocarbon chains comprising 1, 2 or 3 carbon atoms, all of which being specifically and individually preferred.

[0743] Also suitable as Y groups for implementing embodiments of the invention include saturated or unsaturated hydrocarbon chains comprising between 1 and 20 carbon atoms, saturated or unsaturated hydrocarbon chains comprising between 1 and 10 carbon atoms, saturated or unsaturated hydrocarbon chains comprising between 1 and 5 carbon atoms, saturated or unsaturated hydrocarbon chains comprising 1, 2 or 3 carbon atoms, and in which said hydrocarbon chain is optionally interrupted by one or more, preferably between 1 and 16, between 1 and 12 or between 1 and 8, non-carbon atom, selected from the group consisting of an oxygen atom, a nitrogen atom, a carbonyl group and/or the following radical:

[chemical structure]

[0744] all of which being specifically preferred and individually contemplated.

[0745] Also suitable as Y groups for implementing embodiments of the invention is:

[chemical structure]

[0746] wherein n is comprised between 1 and 29, in particular between 1 and 5; and wherein m is comprised between 1 and 29, in particular between 1 and 5.

[0747] Suitable covalent-bond formation conditions: As used herein, unless indicated otherwise or contradictory in context, the term “suitable covalent-bond formation conditions” means reaction conditions such as pressure, temperature, reagent quantities, solvent's type and quantity, or stirring, under which starting materials may contact and provide at least one further material resulting from the formation of at least one covalent bond between said starting materials. Suitable as covalent-bond formation conditions for implementing embodiments of the present invention preferably include substantially atmospheric conditions.

[0748] Organic spacing-compound: In the present description and unless otherwise indicated, the term “organic spacing compound” means an organic chemical radical (preferably monofunctional radical) having the ability to create a steric effect/hindrance and/or electronic effect/hindrance in a direct vicinity of a (modified) GFR-binding compound of the present disclosure. Suitable organic spacing compounds include, but are not limited to, monovalent organic radicals independently selected from the group consisting of a saturated or unsaturated hydrocarbon chain of at most 20 nanometres (nm) in length, preferably at most 10 nm, 5 nm, 1 nm, 0.5 nm, 0.1 nm, 0.05 nm or 0.01 nm, wherein said hydrocarbon chain is optionally interrupted by one or more, preferably between 1 and 16, between 1 and 12 or between 1 and 8 non-carbon atoms as appropriate, wherein said non-carbon atom is selected from the group consisting of —O—, —S—, —C(═O), —SO₂—, —N(Rⁱ)(C═O)—, and —N(Rⁱ)—, wherein Rⁱ is selected from the group consisting of a hydrogen atom, a C1-C6 alkyl group and an aryl group, and wherein said hydrocarbon chain is non-substituted or substituted by at least one radical selected from the group consisting of a halogen, a hydroxyl group, a C1-C20 alkyl group and an aryl group. In particular, organic spacing compounds include saturated or unsaturated hydrocarbon chains comprising between 1 and 80 carbon atoms, saturated or unsaturated hydrocarbon chains comprising between 1 and 60 carbon atoms, saturated or unsaturated hydrocarbon chains comprising between 1 and 40 carbon atoms, saturated or unsaturated hydrocarbon chains comprising between 1 and 20 carbon atoms, saturated or unsaturated hydrocarbon chains comprising between 1 and 10 carbon atoms, saturated hydrocarbon chains comprising 1, 2, 3, 4, 5 or 6 carbon atoms, all of which being specifically and individually preferred. In one example, the saturated hydrocarbon chain may be methyl, ethyl, propyl, butyl or pentyl. In one example, said unsaturated hydrocarbon chain may be ethylene, propene, 1- or 2-butene, 1-, 2- or 3-pentene, acetylene, propyne, 1- or 2-butyne, 1-, 2- or 3-pentyne.

[0749] Saturated hydrocarbon chain: In the present description and unless otherwise indicated, the terms “saturated hydrocarbon chain” means a chain of carbon atoms linked together by single bonds and has hydrogen atoms filling all of the other bonding orbitals of the carbon atoms.

[0750] Unsaturated hydrocarbon chain: In the present description and unless otherwise indicated, the terms “unsaturated hydrocarbon chain” means a chain of carbon that contains carbon-carbon double bonds or triple bonds, such as those found in alkenes or alkynes, respectively.

[0751] Atmospheric conditions: As used herein, unless indicated otherwise or contradictory in context, the term “atmospheric conditions” or “ambient conditions”, which are interchangeably used, refers to conditions which may be found naturally at an experimentation location. For example, in certain embodiments, typical atmospheric conditions in a chemistry/biology laboratory are a temperature of between about 150C and about 35° C. and a pressure of about 1 atm.

[0752] Solution: As used herein, unless indicated otherwise or contradictory in context, the term “solution” means a homogeneous mixture composed of only one phase, which is stable, which does not allow beam of light to scatter, in which the particles of solute cannot be seen by naked eye and from which a solute cannot be separated by filtration.

[0753] Suspension: As used herein, unless indicated otherwise or contradictory in context, the term “suspension” means a heterogeneous mixture containing solid particles that are sufficiently large for sedimentation. Typically, said solid particles are larger than one micrometer. In general, the internal phase (solid) is dispersed throughout the external phase (fluid) through mechanical agitation, with the use of certain excipients or suspending agents.

[0754] Suitable non-covalent association or functionalization techniques for implementing embodiments of the present invention include, but are not limited to, association(s) between a bioactive carrier-affinity containing group as already defined herein and at least part of a bioactive carrier. Such association(s) involves the formation of at least one non-covalent interaction (or attachment) between a (modified) GFR-binding compound and a bioactive carrier as defined herein.

[0755] In one example, said pharmaceutical association or combination is functionally associated with at least two, at least three, at least four, at least five, at least six, at least seven, at least eight, at least nine or at least ten (modified) GFR-binding compounds, each possessing a different and distinct chemical structure.

[0756] In one example, said pharmaceutical association or combination does not comprise a layer of polysiloxane.

[0757] In an example, a bioactive carrier of the present invention (further) comprises at least one compound selected from the group consisting of anti-cancer agents as already defined herein, and an anti-inflammatory agent such as Celecoxib, Diclofenac, Diflunisal, Etodolac, Ibuprofen, Indomethacin, Ketoprofen, Ketorolac, Nabumetone, Naproxen, Oxaprozin, Piroxicam, Salsalate, Sulindac or Tolmetin.

[0758] For example, in certain embodiments, said further compounds interact covalently or non-covalently as already defined herein with said bioactive carrier.

[0759] For example, in certain embodiments, a pharmaceutical association or combination as defined herein comprises at least one (modified) GFR-binding compound, and at least one bioactive carrier, wherein said bioactive carrier:
[0760] has a porosity (or average pore diameter) comprised between 1 nm and 1000 μm, as measured by scanning electronic microscopy for pore sizes within the supra-nanometre range and by atomic force microscopy for pore sizes within the nanometre range, and/or
[0761] comprises a stiffness of at least 5 kPa, preferably at least 35 kPa, as measured by Dynamic Mechanical Analysis, and/or
[0762] is selected from the group consisting of biopolymers (collagen, fibrin, . . . etc), synthetic polymers (PEEK, PET, . . . etc), solid materials (Titanium, Metals . . . etc) and ceramics (Hydroxyapatite, Beta-tricalcium Phosphate, Biphasic Calcium Phosphate . . . etc), and/or
[0763] comprises a density or concentration of associated compound (I) comprised between 0.05×10⁻¹² mol/mm² and 50×10⁻¹² mol/mm², as measured by conventional fluorescence microscopy or calculated theoretically on the basis of the peptide size, and/or
[0764] does not comprise a layer of polysiloxane.

[0765] Porosity: As used herein, unless indicated otherwise or contradictory in context, the term “porosity” refers to the measure of the void spaces in a substance or material, and is a fraction of the volume of voids over the total volume, between 0 and 1, or as a percentage between 0 and 100%. There are many ways to test and measure the porosity of a substance or material, but for the purpose of the present disclosure, and for the avoidance of any doubts, porosity values are provided in manometers (nm) as obtained using atomic force microscopy for small pore diameters (up to 100 nm) and scanning electron microscopy for larger pore sizes.

[0766] Stiffness: As used herein, unless indicated otherwise or contradictory in context, the term “stiffness” refers to the rigidity of a substance or material i.e. the extent to which it resists deformation in response to an applied force. There are many ways to test and measure the stiffness of a substance or material, but for the purpose of the present disclosure, and for the avoidance of any doubts, stiffness values are provided in Pascal (Pa) as obtained using Dynamic Mechanical Analysis (DMA). Particularly preferred stiffness values are comprised between 1 kPa and 100 kPa and not more than 5 GPa depending on the tissue to be regenerated or repaired.

[0767] As already stated, the nature of the biomaterial is an important parameter. Particularly good results have been obtained using bioactive carriers composed mostly with the main material component of the tissue to be regenerated and/or repaired. This generally allows for a better integration of the bioactive carrier, a better resorption from the surrounding cells already present and therefore a better regeneration or repair of the targeted tissue to be achieved.

[0768] In one particular example, the concentration or density (as defined herein) of (modified) GFR-binding compounds in a pharmaceutical association, combination or composition as defined herein is comprised between 0.05 and 50 pmol/mm², in particular comprised between 0.1 and 30 pmol/mm², comprised between 0.1 and 10 pmol/mm², comprised between 0.1 and 5 pmol/mm², or comprised between 0.1 and 2 pmol/mm², each range being preferred and specifically contemplated to be combined with any other numerical or non-numerical ranges as described herein. Most particularly, the density is comprised between 0.2 and 2 pmol/mm².

### VIII. Pharmaceutical Compositions

[0769] In one aspect, the present disclosure provides a composition such as a pharmaceutical, prophylactic, surgical, diagnostic, or imaging composition (hereinafter shorten as pharmaceutical or medical composition) for the uses and methods already disclosed herein comprising at least one pharmaceutical association or combination as defined herein and further comprising at least one pharmaceutically acceptable excipient carriers and/or vehicles.

[0770] Formulations of the pharmaceutical compositions described herein may be prepared by any method known or hereafter developed in the art of pharmacology. Generally, such methods of preparation include the step of bringing the active ingredient(s) into association with an excipient and/or one or more other accessory ingredients, and then, if necessary and/or desirable, shaping and/or packaging the product into a desired single- or multi-dose unit.

[0771] For example, in certain embodiments, a pharmaceutical composition as defined herein may contain between 0.01% and 100% by weight (over the total weight of the pharmaceutical composition) of a (modified) GFR-binding compound or a pharmaceutical association or combination, both as defined herein, as a pharmaceutically effective amount. The pharmaceutical composition particularly comprises between 0.01% and 95%, between 0.01% and 90%, between 0.01% and 85%, between 0.01% and 80%, between 0.01% and 75%, between 0.01% and 70%, between 0.01% and 65%, between 0.01% and 60%, between 0.01% and 55%, between 0.01% and 50%, between 0.01% and 45%, between 0.01% and 40%, between 0.01% and 35%, between 0.01% and 30%, between 0.01% and 25%, between 0.01% and 20%, between 0.01% and 15%, between 0.01% and 10%, between 0.01% and 5%, between 0.1% and 100%, between 0.1% and 95%, between 0.1% and 90%, between 0.1% and 85%, between 0.1% and 80%, between 0.1% and 75%, between 0.1% and 70%, between 0.1% and 65%, between 0.1% and 60%, between 0.1% and 55%, between 0.1% and 50%, between 0.1% and 45%, between 0.1% and 40%, between 0.1% and 35%, between 0.1% and 30%, between 0.1% and 25%, between 0.1% and 20%, between 0.1% and 15%, between 0.1% and 10%, and between 0.1% and 5% by weight (over the total weight of the pharmaceutical composition) of any one of a (modified) GFR-binding compound or a pharmaceutical association or combination as defined herein.

[0772] Generally, the (modified) GFR-binding compounds or pharmaceutical association or combinations as defined herein may thus be administered as such or as part of a formulation in association with one or more pharmaceutically acceptable excipients, carriers and/or vehicles so as to form what is generally referred to as a pharmaceutical composition or pharmaceutical formulation.

[0773] Pharmaceutical effective amount: As used herein, unless indicated otherwise or contradictory in context, the term “pharmaceutical effective amount” or “therapeutically effective amount” refers to an amount of an agent to be delivered (e.g., nucleic acid, protein, peptide, drug, therapeutic agent, diagnostic agent, prophylactic agent, etc.) that is sufficient, when administered to a subject suffering from or susceptible to an infection, disease, disorder, condition and/or pathology, to produce/provide a therapeutically effective outcome. Thus, a “pharmaceutical effective amount” depends upon the context in which it is being applied. A pharmaceutical effective amount of a composition is provided based, at least in part, on the target tissue, target cell type, means of administration, physical characteristics of the pharmaceutical association or composition (e.g., size, 3D shape, etc.), and other determinants. For example, in certain embodiments, in the context of administering an agent that treats cancer, a pharmaceutical effective amount of an agent is, for example, in certain embodiments, an amount sufficient to achieve treatment, as defined herein, of cancer, as compared to the response obtained without administration of the agent. For example, in certain embodiments, a therapeutically effective amount as used herein is any of the herein disclosed weight or molar amounts, ratios or ranges of the (modified) GFR-binding compound, the bioactive carrier or the association/combination thereof.

[0774] Therapeutically effective outcome: As used herein, unless indicated otherwise or contradictory in context, the term “therapeutically effective outcome” refers to an outcome that is sufficient in a subject suffering from or susceptible to an infection, disease, disorder, condition and/or pathology, to treat, improve symptoms of, diagnose, prevent, and/or delay the onset of the infection, disease, disorder, condition and/or pathology.

[0775] Therapeutic Agent: As used herein, unless indicated otherwise or contradictory in context, the term “therapeutic agent” refers to any agent that, when administered to a subject/patient/individual, has a therapeutic, diagnostic, and/or prophylactic effect and/or elicits a desired biological and/or pharmacological effect.

[0776] Pharmaceutically acceptable: As used herein, unless indicated otherwise or contradictory in context, the term “pharmaceutically acceptable” refers to those compounds, materials, compositions, and/or dosage forms which are, within the ambit of sound medical judgment, suitable for use in contact with the tissues of human beings and animals without excessive toxicity, irritation, allergic response, or other problem or complication, commensurate with a reasonable benefit/risk ratio.

[0777] Pharmaceutically acceptable excipients: As used herein, unless indicated otherwise or contradictory in context, the term “pharmaceutically acceptable excipient” refers to any ingredient other than the compounds described herein (i.e. GFR-binding compounds, bioactive carriers as defined herein or any further active principles) and satisfying to the herein defined definition of pharmaceutically acceptable for a patient. Excipients may include, for example: inert diluents, dispersing and/or granulating agents, surface active agents and/or emulsifiers, disintegrating agents, binding agents, preservatives, buffering agents, lubricating agents, oils, printing inks, sweeteners, and/or waters of hydration. The choice of excipient(s) will largely depend on factors such as the particular mode of administration, the effect of the excipient(s) on solubility and stability, and the nature of the dosage form. In one embodiment, the pharmaceutically acceptable excipient is not a naturally occurring excipient.

[0778] Diluents: As used herein, unless indicated otherwise or contradictory in context, diluents include, but are not limited to, calcium carbonate, sodium carbonate, calcium phosphate, dicalcium phosphate, calcium sulfate, calcium hydrogen phosphate, sodium phosphate lactose, sucrose, cellulose, microcrystalline cellulose, kaolin, mannitol, sorbitol, inositol, sodium chloride, dry starch, powdered sugar and/or any combinations thereof.

[0779] Buffering agents: As used herein, unless indicated otherwise or contradictory in context, buffering agents include, but are not limited to, citrate buffer solutions, acetate buffer solutions, phosphate buffer solutions, ammonium chloride, potassium acetate, potassium chloride, monobasic potassium phosphate, calcium carbonate, calcium chloride, calcium citrate, calcium gluconate, calcium lactate, propanoic acid, calcium levulinate, pentanoic acid, phosphoric acid, calcium hydroxide phosphate, sodium acetate, sodium bicarbonate, sodium chloride, sodium citrate, sodium lactate, magnesium hydroxide, aluminum hydroxide, alginic acid, pyrogen-free water, isotonic saline, Ringer's solution, ethyl alcohol and any combinations thereof.

[0780] Granulating and/or dispersing agents: As used herein, unless indicated otherwise or contradictory in context, granulating and/or dispersing agents include, but are not limited to, potato starch, corn starch, tapioca starch, sodium starch glycolate, clays, alginic acid, guar gum, citrus pulp, agar, bentonite, cellulose and wood products, natural sponge, cation-exchange resins, calcium carbonate, silicates, sodium carbonate, cross-linked poly(vinyl-pyrrolidone), sodium carboxymethyl starch, carboxymethyl cellulose, cross-linked sodium carboxymethyl cellulose, methylcellulose, pregelatinized starch, microcrystalline starch, water insoluble starch, calcium carboxymethyl cellulose, magnesium aluminum silicate, sodium lauryl sulfate, quaternary ammonium compounds and/or any combinations thereof.

[0781] Surface active agents and/or emulsifiers: As used herein, unless indicated otherwise or contradictory in context, surface active agents and/or emulsifiers include, but are not limited to, colloidal clays (such as aluminum silicates and magnesium aluminum silicates), natural emulsifiers (such as acacia, agar, sodium alginate, cholesterol, xanthan, pectin, gelatin, egg yolk, casein, cholesterol, wax, and lecithin), long chain amino acid derivatives, high molecular weight alcohols (such as stearyl, cetyl and oleyl alcohols, triacetin monostearate, ethylene glycol distearate and glyceryl monostearate), carbomers (such as carboxy polymethylene, polyacrylic acid, acrylic acid polymer, and carboxyvinyl polymer), diethylene glycol monolaurate, triethanolamine oleate, sodium oleate, potassium oleate, ethyl oleate, oleic acid, ethyl laurate, sodium lauryl sulfate, cetrimonium bromide, cetylpyridinium chloride, benzalkonium chloride, docusate sodium, carrageenan, cellulosic derivatives (such as carboxymethylcellulose sodium, hydroxymethyl cellulose, hydroxypropyl methylcellulose and methylcellulose), sorbitan fatty acid esters (such as polyoxyethylene sorbitan monolaurate, polyoxyethylene sorbitan, polyoxyethylene sorbitan monooleate, sorbitan monopalmitate and glyceryl monooleate), polyoxyethylene esters, sucrose fatty acid esters, polyethylene glycol fatty acid esters, polyoxyethylene ethers, poly(vinyl-pyrrolidone), and any combinations thereof.

[0782] Binding agents: As used herein, unless indicated otherwise or contradictory in context, binding agents include, but are not limited to, natural and synthetic gums (such as acacia, sodium alginate, carboxymethylcellulose, methylcellulose, ethylcellulose, hydroxyethylcellulose, hydroxypropyl cellulose, hydroxypropyl methylcellulose, microcrystalline cellulose, cellulose acetate and poly(vinyl-pyrrolidone), gelatin, starch, sugars (such as sucrose, dextrose, glucose, dextrin, lactose, and mannitol), alignates, magnesium aluminum silicates, polyethylene glycol, polyethylene oxide, inorganic calcium salts, water, alcohol, silicic acid, waxes, and any combinations thereof.

[0783] Preservatives: As used herein, unless indicated otherwise or contradictory in context, preservatives include, but are not limited to, antioxidants, chelating agents, antifungal preservatives, antimicrobial preservatives, acidic preservatives, and alcohol preservatives.

[0784] Antioxidants: As used herein, unless indicated otherwise or contradictory in context, antioxidants include, but are not limited to, alpha tocopherol, ascorbic acid, acorbyl palmitate, butylated hydroxyanisole, propionic acid, potassium metabisulfite, propyl gallate, sodium metabisulfite, sodium ascorbate, and sodium sulfite.

[0785] Chelating agents: As used herein, unless indicated otherwise or contradictory in context, chelating agents include ethylenediaminetetraacetic acid (EDTA), fumaric acid, malic acid, phosphoric acid, citric acid monohydrate and tartaric acid.

[0786] Antimicrobial preservatives: As used herein, unless indicated otherwise or contradictory in context, antimicrobial preservatives include, but are not limited to, benzalkonium chloride, benzethonium chloride, chlorhexidine, chlorobutanol, chlorocresol, chloroxylenol, benzyl alcohol, bronopol, cetylpyridinium chloride, cresol, ethyl alcohol, glycerin, hexetidine, imidurea, phenoxyethanol, phenylmercuric nitrate, phenylethyl alcohol, phenol, and propylene glycol.

[0787] Antifungal preservatives: As used herein, unless indicated otherwise or contradictory in context, antifungal preservatives include, but are not limited to, benzoic acid, hydroxybenzoic acid, butyl paraben, methyl paraben, ethyl paraben, propyl paraben, potassium benzoate, sodium propionate, potassium sorbate, and/or sorbic acid.

[0788] Alcohol preservatives: As used herein, unless indicated otherwise or contradictory in context, alcohol preservatives include, but are not limited to, phenol, phenolic compounds, bisphenol, ethanol, polyethylene glycol, chlorobutanol and hydroxybenzoate.

[0789] Acidic preservatives: As used herein, unless indicated otherwise or contradictory in context, acidic preservatives include, but are not limited to, vitamin A, vitamin C, vitamin E, beta-carotene, acetic acid, citric acid, dehydroacetic acid, and sorbic acid.

[0790] Lubricating agents: As used herein, unless indicated otherwise or contradictory in context, lubricating agents include, but are not limited to, magnesium stearate, calcium stearate, stearic acid, sodium benzoate, sodium acetate, sodium chloride, silica, talc, malt, glyceryl behanate, hydrogenated vegetable oils, polyethylene glycol, magnesium lauryl sulphate and any combinations thereof.

[0791] Sweeteners: As used herein, unless indicated otherwise or contradictory in context, sweeteners include, but are not limited to, any natural or synthetic sugar substitutes. Natural sugar substitutes include, but are not limited to, brazzein, curculin, erythritol, glycyrrhizin, glycerol, hydrogenated starch hydrolysates, inulin, isomalt, lactitol, mogroside mix, mabinlin, maltitol, malto-oligosaccharide, mannitol, miraculin, monatin, monellin, osladin, pentadin, sorbitol, stevia, tagatose, thaumatin, and xylitol. Synthetic sugar substitutes include, but are not limited to, acesulfame potassium, advantame, alitame, aspartame, salt of aspartame-acesulfame, sodium cyclamate, dulcin, glucin, neohesperidin dihydrochalcone, neotame, P-4000, saccharin, Sucralose.

[0792] Exemplary excipients include, but are not limited to: butylated hydroxytoluene (BHT), calcium carbonate, calcium phosphate (dibasic), calcium stearate, croscarmellose, crosslinked polyvinyl pyrrolidone, citric acid, crospovidone, cysteine, ethylcellulose, gelatin, hydroxypropyl cellulose, hydroxypropyl methylcellulose, lactose, magnesium stearate, maltitol, mannitol, methionine, methylcellulose, methyl paraben, microcrystalline cellulose, polyethylene glycol, polyvinyl pyrrolidone, povidone, pregelatinized starch, propyl paraben, retinyl palmitate, shellac, silicon dioxide, sodium carboxymethyl cellulose, sodium citrate, sodium starch glycolate, sorbitol, starch, stearic acid, sucrose, talc, titanium dioxide, vitamin A, vitamin E, vitamin C, and xylitol. Suitable excipients for use in the present invention also include, but are not limited to, water, phosphate buffered saline (PBS), Ringer's solution, dextrose solution, serum-containing solutions, Hank's solution, other aqueous physiologically balanced solutions, oils, esters and glycols. Aqueous excipients can contain suitable auxiliary substances required to approximate the physiological conditions of the recipient, for example, in certain embodiments, by enhancing chemical stability and isotonicity.

[0793] Pharmaceutically/medically acceptable carriers: As used herein, unless indicated otherwise or contradictory in context, the term “pharmaceutically acceptable carriers”, “medically acceptable carrier” or “carriers” refers to pharmaceutically acceptable excipients and/or delivery vehicles suitable for delivering a pharmaceutical or therapeutic composition useful in a therapeutic method and uses of the present invention to a suitable in-vivo or ex-vivo site. Preferred pharmaceutically acceptable carriers are capable of maintaining a composition containing an active combination or association of a (modified) GFR-binding compound and a bioactive carrier as defined herein, in a form that, upon arrival of the combination to a target cell, site or tissue, the active combination is capable of performing one or more biological functions thereof the protein at the cell or tissue site. One type of pharmaceutically acceptable carrier includes a controlled release formulation that is capable of slowly releasing a composition or combination into an animal. In one example, a controlled release formulation comprises an active combination or association as defined herein in a controlled release vehicle. Suitable controlled release vehicles include, but are not limited to, microparticles, biocompatible polymers, other polymeric matrices, capsules, microcapsules, osmotic pumps, bolus preparations, diffusion devices, liposomes, lipospheres, and transdermal delivery systems. Such suitable controlled release vehicle may be combined with at least one targeting moiety. In one embodiment, the pharmaceutically acceptable carrier is not a naturally occurring carrier.

[0794] Targeting Moieties: In one example, the pharmaceutical association or combination disclosed herein includes at least one binding partner which functions to target the cell to a specific tissue space or to interact with a specific moiety, either in-vivo, ex-vivo or in-vitro. Suitable binding partners include antibodies and functional fragments thereof, scaffold proteins, or peptides.

[0795] In one example, said excipients, carriers or vehicles are compatible with the (modified) GFR-binding compounds or pharmaceutical association or combinations defined herein so that they do not disrupt, tamper, modify, de-organise, de-combine or de-associate said the (modified) GFR-binding compounds or pharmaceutical association or combinations. In contrast, said excipients, carriers or vehicles preserves, maintains or reinforces the stability of the (modified) GFR-binding compounds or pharmaceutical association or combinations so as to preserve their biological activity.

[0796] In one example, the present pharmaceutical compositions also include pharmaceutically acceptable salts and/or solvates and/or prodrugs and/or isotopically-labelled derivatives of the substances and compounds described herein such as the (modified) GFR-binding compounds or any other active principles.

[0797] Pharmaceutically acceptable salts: As used herein, unless indicated otherwise or contradictory in context, the term “pharmaceutically acceptable salts” refers to derivatives of the disclosed substances and compounds wherein the parent substance or compound is modified by converting an existing acid or base moiety to its salt form (e.g., by reacting the free base group with a suitable organic acid). The degree of ionization in the salt may vary from completely ionized to almost non-ionized. Examples of pharmaceutically acceptable salts include, but are not limited to, mineral or organic acid salts of basic residues such as amines; alkali or organic salts of acidic residues such as carboxylic acids; and the like. Representative acid addition salts include acetate, adipate, alginate, ascorbate, aspartate, benzenesulfonate, benzoate, bisulfate, borate, butyrate, camphorate, camphorsulfonate, citrate, cyclopentanepropionate, digluconate, dodecylsulfate, ethanesulfonate, fumarate, glucoheptonate, glycerophosphate, hemisulfate, heptonate, hexanoate, hydrobromide, hydrochloride, hydroiodide, 2-hydroxy-ethanesulfonate, lactobionate, lactate, laurate, lauryl sulfate, malate, maleate, malonate, methanesulfonate, 2-naphthalenesulfonate, nicotinate, nitrate, oleate, oxalate, palmitate, pamoate, pectinate, persulfate, 3-phenylpropionate, phosphate, picrate, pivalate, propionate, stearate, succinate, sulfate, tartrate, thiocyanate, toluenesulfonate, undecanoate, valerate salts, and the like. Representative alkali or alkaline earth metal salts include sodium, lithium, potassium, calcium, magnesium, and the like, as well as nontoxic ammonium, quaternary ammonium, and amine cations, including, but not limited to ammonium, tetramethylammonium, tetraethylammonium, methylamine, dimethylamine, trimethylamine, triethylamine, ethylamine, and the like. The pharmaceutically acceptable salts of the present disclosure include the conventional non-toxic salts of the parent compound formed, for example, in certain embodiments, from non-toxic inorganic or organic acids. The pharmaceutically acceptable salts of the present disclosure can be synthesized from the parent compound which contains a basic or acidic moiety by conventional chemical methods. Generally, such salts can be prepared by reacting the free acid or base forms of these compounds with a stoichiometric amount of the appropriate base or acid in water or in an organic solvent, or in a mixture of the two; generally, non-aqueous media like ether, ethyl acetate, ethanol, isopropanol, or acetonitrile are preferred. Lists of suitable salts are generally found in Remington's Pharmaceutical Sciences, 17th ed., Mack Publishing Company, Easton, Pa., 1985, p. 1418 and in Pharmaceutical Salts: Properties, Selection, and Use, P. H. Stahl and C. G. Wermuth (eds.), Wiley-VCH, 2008, each of which being incorporated herein by reference in its entirety. In one embodiment, the pharmaceutically acceptable salt is not a naturally occurring salt.

[0798] Pharmaceutically acceptable solvate: As used herein, unless indicated otherwise or contradictory in context, the term “pharmaceutically acceptable solvate,” refers to a compound, substance, association or combination wherein molecules of a suitable solvent are incorporated in the crystal lattice. A suitable solvent is physiologically tolerable at the dosage administered. For example, in certain embodiments, solvates may be prepared by crystallization, recrystallization, or precipitation from a solution that includes organic solvents, water, or a mixture thereof. Examples of suitable solvents are ethanol, water (For example, in certain embodiments, mono-, di-, and tri-hydrates), N-methylpyrrolidinone (NMP), dimethyl sulfoxide (DMSO), dimethylformamide (DMF), [Nu],[Nu]′-dimethylacetamide (DMAC), 1,3-dimethyl-2-imidazolidinone (DMEU), 1,3-dimethyl-3,4,5,6-tetrahydro-2-(1H)-pyrimidinone (DMPU), acetonitrile (ACN), propylene glycol, ethyl acetate, benzyl alcohol, 2-pyrrolidone, benzyl benzoate, and the like. When water is the solvent, the solvate is referred to as a “hydrate”. In one embodiment, the pharmaceutically acceptable solvate is not a naturally occurring solvate.

[0799] Pharmaceutically acceptable isotopically-labelled compounds: In one example, the present invention also includes all pharmaceutically acceptable isotopically-labelled derivatives, which are identical to the compounds, substances, combinations or associations described herein but wherein one or more atoms are replaced by atoms having an atomic mass or mass number different from the atomic mass or mass number usually found in nature. Examples of isotopes that may be incorporated into GFR-binding compound(s) as defined herein include isotopes of hydrogen, carbon, chlorine, fluorine, iodine, nitrogen, oxygen, and sulfur, such as ²H, ³H, ¹¹C, ¹³C, 14C, ³⁶Cl, ¹⁸F, ¹²³I, ¹³N, ¹⁵N, ¹⁷O, ¹⁸O, and ³⁵S, respectively. It should be understood that compounds, substances, combinations, associations, prodrugs, and pharmaceutical acceptable salts thereof described herein which contain the aforementioned isotopes and/or other isotopes of other atoms are within the scope of the invention. Certain isotopically labeled of the compounds, substances, combinations, associations, prodrugs, and salts thereof such as, for example, in certain embodiments, those incorporating a radioactive isotope such as ³H and ¹⁴C, are useful in drug and/or substrate tissue distribution studies. Tritium, i.e. ³H, and carbon-14, i.e. ¹⁴O, are particularly preferred due to their ease of preparation and detection. Further, substitution with heavier isotopes such as deuterium, i.e. ²H, can afford certain therapeutic advantages resulting from greater metabolic stability, for example, in certain embodiments, increased in vivo half-life or reduced dosage requirements, and hence may be preferred in some circumstances. Isotopically labeled compounds, substances, combinations, associations, prodrugs, and salts thereof can generally be prepared by carrying out the procedures disclosed in the Schemes and/or in the Examples by substituting a readily available non-isotopically labeled reagent for an isotopically labeled reagent.

[0800] Prodrugs: As used herein, unless indicated otherwise or contradictory in context, the term “prodrug” refers to a compound, substance, combination or association that is transformed in vivo to yield a compound, substance, combination or association as defined herein or a pharmaceutically acceptable salt or solvate thereof. The transformation may occur by various mechanisms, such as via hydrolysis in blood. A prodrug of a compound, substance, combination or association defined herein may be formed in a conventional manner with one or more functional groups in the compound, such as an amino, hydroxyl or carboxyl group. For example, in certain embodiments, if a compound defined herein contains a carboxylic acid functional group, a prodrug can comprise: (1) an ester formed by the replacement of a hydrogen of the acid group with a group such as (C1-C6)alkyl or (C6-C10) aryl; (2) an activated ester formed by the replacement of the hydrogen of the acid group with groups such as —(CR²)COOR′, where CR² is a spacer and R can be groups such as H or methyl and R′ can be groups such as (C1-C6)alkyl or (C6-C10) aryl; and/or (3) a carbonate formed by the replacement of the hydrogen of the acid with groups such as CHROCOOR′ where R can be groups such as H or methyl and R′ can be groups such as (C1-C6)alkyl or (C6-C10)aryl. Similarly, if a compound defined herein contains an alcohol functional group, a prodrug can be formed via the replacement of the hydrogen of the alcohol with groups such as (C1-C6)alkanoyloxymethyl or (C1-C6)alkanoyloxyaryl or by forming an ester via condensation with, for example, in certain embodiments, an amino acid. Where a compound defined herein contains a primary or secondary amino group, a prodrug may comprise, for example, in certain embodiments, an amide formed by the replacement of one or both of the hydrogen atoms of the amino group with (C1-C10)alkanoyl or (C6-C10)aroyl. Other prodrugs of amines are well known to those skilled in the art.

[0801] Alternatively, certain compounds defined herein may themselves act as prodrugs of other compounds defined herein. Discussions regarding prodrugs and their use can be found in, for example, in certain embodiments, “Prodrugs as Novel Delivery Systems,” T. Higuchi and W. Stella, Vol. 14 of the ACS Symposium Series, and Bioreversible Carriers in Drug Design, Pergamon Press, 1987 (ed. E B Roche, American Pharmaceutical Association). Examples of other prodrug types may be found in the aforementioned reference which is hereby incorporated by reference.

### IX. Administration Routes and Procedures

[0802] Compounds, substances, pharmaceutical associations or combinations to be delivered and/or pharmaceutical, dermatological, prophylactic, diagnostic, or imaging compositions or formulations thereof in accordance with the present disclosure may be administered by any route of administration effective for preventing, treating, diagnosing, or imaging a disease, disorder, and/or condition and/or treating or alleviating at least one symptoms thereof.

[0803] Suitable administration protocols include any in-vitro, in-vivo or ex-vivo administration protocol. The preferred types and routes of administration will be apparent to those of skill in the art, depending on the type of condition or disease to be prevented or treated; whether the composition is nucleic acid based, protein based, cell based or combinations or mixtures thereof; and/or the target cell/tissue.

[0804] Cells, tissues or organs can be contacted ex vivo or in vitro with a pharmaceutical association or combination for uses and methods of the invention by any suitable method, including mixing or the use of a delivery vehicle. Effective in vitro or ex vivo culture conditions include, but are not limited to, effective media, bioreactor, temperature, pH and oxygen conditions that permit cell culture. An effective medium refers to any medium in which a given host cell or tissue is typically cultured. Such medium typically comprises an aqueous medium having assimilable carbon, nitrogen and phosphate sources, and appropriate salts, minerals, metals and other nutrients, such as vitamins. Cells can be cultured in conventional fermentation bioreactors, shake flasks, test tubes, microtiter dishes, and petri plates. Culturing can be carried out at a temperature, pH and oxygen content appropriate for a cell or tissue. Such culturing conditions are within the expertise of one of ordinary skill in the art.

[0805] In one aspect, the present disclosure thus also provides a method for converting a neoplastic cell into a non-neoplastic cell, in-vitro or ex-vivo as defined herein, said method comprising the administration to a neoplastic cell of an effective amount of a pharmaceutical association, combination or composition as defined herein.

[0806] Ex-vivo administration: As used herein, unless indicated otherwise or contradictory in context, the term “ex-vivo administration” refers to performing the regulatory step outside of the subject/patient, such as administering a pharmaceutical association, combination or composition as defined herein to a population of cells (e.g., neoplastic cells) removed from a subject/patient for e.g. diagnostic, analysis and/or academic purposes.

[0807] In-vivo administration: In one example, pharmaceutical, prophylactic, diagnostic, or imaging associations, combinations or compositions are administered by one or more of a variety of routes, including oral, intravenous, intramuscular, intra-arterial, intramedullary, rectal, intravaginal, intrathecal, subcutaneous, intraventricular, transdermal, intradermal, intraperitoneal, topical (e.g. by ointments, creams, powders, lotions, gels, and/or drops), buccal, enteral, mucosal, nasal, vitreal, intratumoral, sublingual, by intra-tracheal instillation, bronchial instillation, and/or inhalation, as an oral spray, nasal spray, and/or aerosol, and/or through a portal vein catheter. In one example, pharmaceutical, prophylactic, diagnostic, or imaging associations, combinations or compositions are administered by systemic intravenous injection. In one example, pharmaceutical, prophylactic, diagnostic, or imaging associations, combinations or compositions may be administered in a way which allows them to cross the blood-brain barrier, vascular barrier, or other epithelial barrier. In one most particular example, pharmaceutical, prophylactic, diagnostic, or imaging associations, combinations or compositions may be administered locally by intratumoral administration.

[0808] Delivery: As used herein, unless indicated otherwise or contradictory in context, the term “delivery” refers to the act or manner of delivering a compound, substance, association, combination, composition, entity, moiety, cargo or payload.

[0809] Delivery Agent: As used herein, unless indicated otherwise or contradictory in context, the term “delivery agent” refers to any substance which facilitates, at least in part, the in vivo delivery of a pharmaceutical association, combination or composition defined herein to targeted cells.

[0810] Forms suitable for oral administration: A pharmaceutical association, combination or composition for uses and methods of the invention, for example, in certain embodiments, includes forms suitable for oral administration as a tablet, capsule, pill, powder, sustained release formulations, solution, suspension, or for parenteral injection as a sterile solution, suspension or emulsion. Pharmaceutical compositions suitable for the delivery of pharmaceutical associations or combinations defined herein and methods for their preparation will be readily apparent to those skilled in the art. Such compositions and methods for their preparation may be found, for example, in certain embodiments, in ‘Remington's Pharmaceutical Sciences’, 19th Edition (Mack Publishing Company, 1995), which is hereby incorporated by reference in its entirety. Oral administration may involve swallowing, so that the compounds or associations enters the gastrointestinal tract, or buccal or sublingual administration may be employed by which the compound enters the blood stream directly from the mouth. Formulations suitable for oral administration include solid formulations, such as tablets, capsules containing particulates, liquids, or powders; lozenges (including liquid-filled), chews; multi- and nano-particulates; gels, solid solution, liposome, films (including muco-adhesive), ovules, sprays and liquid formulations. Liquid formulations include suspensions, solutions, syrups and elixirs. Such formulations may be employed as fillers in soft or hard capsules and typically comprise a carrier, for example, in certain embodiments, water, ethanol, polyethylene glycol, propylene glycol, methylcellulose, or a suitable oil, and one or more emulsifying agents and/or suspending agents. Liquid formulations may also be prepared by the reconstitution of a solid, for example, in certain embodiments, from a sachet. The pharmaceutical associations defined herein may also be used in fast-dissolving, fast-disintegrating dosage forms such as those described in the art.

[0811] Forms suitable for parenteral administration: In one example, the pharmaceutical association, combination or composition for uses and methods of the invention may be administered by parenteral injection. Exemplary parenteral administration forms include sterile solutions, suspensions or emulsions of the pharmaceutical association defined herein in sterile aqueous media, for example, in certain embodiments, aqueous propylene glycol or dextrose. In another embodiment, the parenteral administration form is a solution. Such parenteral dosage forms can be suitably buffered, if desired. Preferred sterile solutions include sodium chloride, 0.9%, UPS solution. Injectable formulations can be sterilized, for example, in certain embodiments, by filtration through a bacterial-retaining filter, and/or by incorporating sterilizing agents in the form of sterile solid compositions which can be dissolved or dispersed in sterile water or other sterile injectable medium prior to use.

[0812] Forms suitable for rectal and vaginal administration: Compositions for rectal or vaginal administration are typically suppositories which can be prepared by mixing compositions with suitable non-irritating excipients such as cocoa butter, polyethylene glycol or a suppository wax which are solid at ambient temperature but liquid at body temperature and therefore melt in the rectum or vaginal cavity and release the active ingredient.

[0813] Forms suitable for topical and/or transdermal administration: Dosage forms for topical and/or transdermal administration of a composition may include ointments, pastes, creams, lotions, gels, powders, solutions, sprays, inhalants and/or patches. Generally, an active ingredient is admixed under sterile conditions with a pharmaceutically acceptable excipient and/or any needed preservatives and/or buffers as may be required.

[0814] Forms suitable for pulmonary administration: Dosage forms for pulmonary administration via the buccal cavity may comprise dry particles which comprise the active ingredient (e.g. the pharmaceutical association defined herein) and which have a diameter in the range from about 0.5 nm to about 7 nm. Such compositions are conveniently in the form of dry powders for administration using a device comprising a dry powder reservoir to which a stream of propellant may be directed to disperse the powder and/or using a self-propelling solvent/powder dispensing container such as a device comprising the active ingredient dissolved and/or suspended in a low-boiling propellant in a sealed container. Pharmaceutical compositions formulated for pulmonary delivery may provide an active ingredient in the form of droplets of a solution and/or suspension. Such formulations may be prepared, packaged, and/or sold as aqueous and/or dilute alcoholic solutions and/or suspensions, optionally sterile, comprising active ingredient, and may conveniently be administered using any nebulization and/or atomization device. Such formulations may further comprise one or more additional ingredients including, but not limited to, a flavoring agent such as saccharin sodium, a volatile oil, a buffering agent, a surface active agent, and/or a preservative such as methylhydroxybenzoate.

[0815] Forms suitable for nasal administration: Formulations described herein as being useful for pulmonary delivery are also useful for intranasal delivery of a pharmaceutical composition. Formulations suitable for nasal administration may, for example, in certain embodiments, comprise from about as little as 0.1% (w/w) and as much as 100% (w/w) of active ingredient (e.g. the pharmaceutical association defined herein), and may comprise one or more of the additional ingredients described herein. A pharmaceutical composition may be prepared, packaged, and/or sold in a formulation suitable for buccal administration. Such formulations may, for example, in certain embodiments, be in the form of tablets and/or lozenges made using conventional methods, and may, for example, in certain embodiments, 0.1% to 20% (w/w) active ingredient, the balance comprising an orally dissolvable and/or degradable composition and, optionally, one or more of the additional ingredients described herein. Alternately, formulations suitable for buccal administration may comprise a powder and/or an aerosolized and/or atomized solution and/or suspension comprising active ingredient. Such powdered, aerosolized, and/or aerosolized formulations, when dispersed, may have an average particle and/or droplet size in the range from about 0.1 nm to about 200 nm, and may further comprise one or more of any additional ingredients described herein.

[0816] Forms suitable for ophthalmic administration: Dosage forms for ophthalmic administration include, for example, in certain embodiments, eye drops including, for example, in certain embodiments, a 0.1/1.0% (w/w) solution and/or suspension of the active ingredient (e.g. the pharmaceutical association defined herein) in an aqueous or oily liquid excipient. Such drops may further comprise buffering agents, salts, and/or one or more other of any additional ingredients described herein. Other opthalmically-administrable formulations which are useful include those which comprise the active ingredient in microcrystalline form and/or in a liposomal preparation. Ear drops and/or eye drops are contemplated as being within the scope of this present disclosure.

[0817] Direct injection: One preferred administration method for delivering a pharmaceutical association, combination or composition as defined herein is by local administration, in particular, by direct injection. Direct injection techniques are particularly useful for administering a composition to a cell or tissue that is accessible by surgery, and particularly, on or near the surface of the body. Administration of a composition locally within the area of a target cell refers to injecting the composition centimeters and preferably, millimeters from the target cell or tissue.

[0818] Dosage regimens: The dosage regimen of the pharmaceutical associations or combinations and/or pharmaceutical compositions as defined herein may be adjusted to provide the optimum desired response. For example, in certain embodiments, a single bolus may be administered, several divided doses may be administered over time or the dose may be proportionally reduced or increased as indicated by the exigencies of the therapeutic situation. The appropriate dosing regimen, the amount of each dose administered and/or the intervals between doses will depend upon the pharmaceutical association being used, the type of pharmaceutical composition, the characteristics of the subject in need of treatment and the severity of the condition being treated. Thus, the skilled artisan would appreciate, based upon the disclosure provided herein, that the dose and dosing regimen is adjusted in accordance with methods well-known in the therapeutic arts. That is, the maximum tolerable dose can be readily established, and the effective amount providing a detectable therapeutic benefit to a patient may also be determined, as can the temporal requirements for administering each agent to provide a detectable therapeutic benefit to the patient. Accordingly, while certain dose and administration regimens are exemplified herein, these examples in no way limit the dose and administration regimen that may be provided to a patient in practicing the present invention. In general, pharmaceutical compositions in accordance with the present disclosure may be administered at dosage levels sufficient to deliver from about 0.0001 mg/kg to about 100 mg/kg, from about 0.01 mg/kg to about 50 mg/kg, from about 0.1 mg/kg to about 40 mg/kg, from about 0.5 mg/kg to about 30 mg/kg, from about 0.01 mg/kg to about 10 mg/kg, from about 0.1 mg/kg to about 10 mg/kg, or from about 1 mg/kg to about 25 mg/kg, of subject body weight per day, one or more times a day, to obtain the desired therapeutic, diagnostic, prophylactic, or imaging effect. The desired dosage may be delivered three times a day, two times a day, once a day, every other day, every third day, every week, every two weeks, every three weeks, or every four weeks.

[0819] In certain embodiments, the desired dosage may be delivered using multiple administrations (e.g., two, three, four, five, six, seven, eight, nine, ten, eleven, twelve, thirteen, fourteen, or more administrations). It is to be further understood that for any particular subject, specific dosage regimens should be adjusted over time according to the individual need and the professional judgment of the person administering or supervising the administration of the compositions, and that dosage ranges set forth herein are exemplary only and are not intended to limit the scope or practice of the present invention. For example, in certain embodiments, doses may be adjusted based on pharmacokinetic or pharmacodynamic parameters, which may include clinical effects such as toxic effects and/or laboratory values. Thus, the present invention encompasses intra-patient dose-escalation as determined by the skilled artisan. Determining appropriate dosages and regiments for administration of the chemotherapeutic agent are well-known in the relevant art and would be understood to be encompassed by the skilled artisan once provided the teachings disclosed herein.

[0820] Effective dose parameters: The dosage regimen of the pharmaceutical associations or combinations and/or pharmaceutical compositions as defined herein may be adjusted to obtain effective dose parameters. Effective dose parameters can be determined using methods standard in the art for a particular disease or condition. In particular, the effectiveness of dose parameters of a therapeutic composition as defined herein when treating cancer can be determined by assessing response rates. Such response rates refer to the percentage of treated patients in a population of patients that respond with either partial or complete remission. Remission can be determined by, for example, in certain embodiments, measuring tumor size or microscopic examination for the presence of cancer cells in a tissue sample.

[0821] A pharmaceutical composition as defined herein may be prepared, packaged, or sold in bulk, as a single unit dose, or as a plurality of single unit doses.

[0822] Unit dose: As used herein, unless indicated otherwise or contradictory in context, the term “unit dose” refers to a discrete amount of the pharmaceutical composition comprising a predetermined amount of the active ingredient. The amount of the active ingredient is generally equal to the dosage of the active ingredient which would be administered to a subject or a convenient fraction of such a dosage such as, for example, in certain embodiments, one-half or one-third of such a dosage.

[0823] Single unit dose: As used herein, unless indicated otherwise or contradictory in context, the term “single unit dose” refers to a dose of any therapeutic association or composition administered in one dose/at one time/single route/single point of contact, i.e., single administration event.

[0824] Split dose: As used herein, unless indicated otherwise or contradictory in context, the term “split dose” refers to the division of single unit dose or total daily dose into two or more doses.

[0825] Total daily dose: As used herein, unless indicated otherwise or contradictory in context, the term “total daily dose” refers to an amount given or prescribed in 24 hr period. It may be administered as a single unit dose.

[0826] The relative amounts of the active ingredient(s), the pharmaceutically acceptable excipients, carriers or vehicles, and any additional ingredients in a pharmaceutical composition defined herein will vary, depending upon the identity, size, and condition of the subject treated and further depending upon the route by which the composition is to be administered. In addition to the active ingredient, a pharmaceutical composition of the invention may further comprise one or more additional pharmaceutically active agents.

[0827] Combination therapy: Compounds, associations, compositions or formulations defined herein may be used in combination with one or more other therapeutic, prophylactic, diagnostic, or imaging agents. As used herein, the term “in combination with” is not intended to imply that the agents must be administered at the same time and/or formulated for delivery together, although these methods of delivery are within the scope of the present disclosure. Compositions can be administered concurrently with, prior to, or subsequent to, one or more other desired therapeutics or medical procedures. In some embodiments, they are administered within about 90, 60, 30, 15, 10, 5, or 1 minute of one another. In some embodiments, the administrations of the agents are spaced sufficiently closely together such that a combinatorial (e.g., a synergistic) effect is achieved. In general, each agent will be administered at a dose and/or on a time schedule determined for that agent. In one example, the present disclosure encompasses the delivery of pharmaceutical, prophylactic, diagnostic, or imaging compositions in combination with agents that improve their bioavailability, reduce and/or modify their metabolism, inhibit their excretion, and/or modify their distribution within the body. It will further be appreciated that therapeutically, prophylactically, diagnostically, or imaging active agents used in combination may be administered together in a single composition or administered separately in different compositions. In general, it is expected that agents used in combination with be used at levels that do not exceed the levels at which they are used individually. In one example, the levels used in combination will be lower than those utilized individually. The particular combination of therapies to employ in a combination regimen will take into account compatibility of the desired therapeutics and/or procedures and the desired therapeutic effect to be achieved. It will also be appreciated that the therapies employed may achieve a desired effect for the same disorder (For example, in certain embodiments, a composition useful for treating cancer in accordance with the present disclosure may be administered concurrently with a chemotherapeutic agent), or they may achieve different effects (e.g., control of any adverse effects).

[0828] Although the descriptions of pharmaceutical associations, combinations or compositions provided herein are principally directed to pharmaceutical associations, combinations or compositions which are suitable for administration to mammals, in particular humans, it will be understood by the skilled artisan that such compositions are generally suitable for administration to animals of all sorts, in particular to any member of the Vertebrate class. Modification of pharmaceutical compositions suitable for administration to humans in order to render the compositions suitable for administration to various animals is well understood, and the ordinarily skilled veterinary pharmacologist can design and/or perform such modification with merely ordinary, if any, experimentation. Subjects to which administration of the pharmaceutical compositions is contemplated include, but are not limited to, humans and/or other primates; mammals, including commercially relevant mammals such as cattle, pigs, horses, sheep, cats, dogs, mice, and/or rats; and/or birds, including commercially relevant birds such as chickens, ducks, geese, and/or turkeys.

### X. Dermatological Applications

[0829] When the neoplastic disease to be prevented or treated involves neoplastic cells belonging to the skin cell lineage (mainly to the fibroblast lineage), the pharmaceutical composition defined herein may be a dermatological composition comprising a pharmaceutical association or combination of a GFR-binding compound and a bioactive carrier as all defined herein and at least one dermatologically acceptable excipient.

[0830] For example, in certain embodiments, a dermatological composition for the uses of the invention may contain between 0.01% and 100% by weight (over the total weight of the dermatological composition) of a GFR-binding compound or pharmaceutical association or combination, both as defined herein, as a dermatological effective amount. The dermatological composition particularly comprises between 0.01% and 95%, between 0.01% and 90%, between 0.01% and 85%, between 0.01% and 80%, between 0.01% and 75%, between 0.01% and 70%, between 0.01% and 65%, between 0.01% and 60%, between 0.01% and 55%, between 0.01% and 50%, between 0.01% and 45%, between 0.01% and 40%, between 0.01% and 35%, between 0.01% and 30%, between 0.01% and 25%, between 0.01% and 20%, between 0.01% and 15%, between 0.01% and 10%, between 0.01% and 5%, between 0.1% and 100%, between 0.1% and 95%, between 0.1% and 90%, between 0.1% and 85%, between 0.1% and 80%, between 0.1% and 75%, between 0.1% and 70%, between 0.1% and 65%, between 0.1% and 60%, between 0.1% and 55%, between 0.1% and 50%, between 0.1% and 45%, between 0.1% and 40%, between 0.1% and 35%, between 0.1% and 30%, between 0.1% and 25%, between 0.1% and 20%, between 0.1% and 15%, between 0.1% and 10%, and between 0.1% and 5% by weight (over the total weight of the dermatological composition) of any one of a GFR-binding compound or a pharmaceutical association or combination.

[0831] Dermatologically acceptable: As used herein, unless indicated otherwise or contradictory in context, the term “dermatologically acceptable” means that the compound(s) or pharmaceutical association(s) used are adapted for use in contact with human skin without undue toxicity, incompatibility, instability, allergic response, or their equivalents.

[0832] Dermatological formulations: Suitable formulation for implementing dermatological embodiments of the invention include an aqueous or oil-based solution, a water-based cream or gel or an oily gel, usually in a jar or a tube, particularly a shower gel, shampoo, milk, emulsion, microemulsion or nanoemulsion, particularly oil-in-water or water-in-oil or multiple of silicone-based; a lotion, particularly in a glass or plastic bottle of a spray or aerosol bottle, a blister-pack, liquid soap, a dermatological bar of soap, a pomade, mousse, an anhydrous product, preferably liquid, cream or solid, for example in the form of a stick, particularly in the form of lipstick, a cataplasm or a patch.

[0833] Preferred administration routes include, but are not limited to, topical, intradermal and intra-tumoral as already defined herein.

[0834] Dermatologically acceptable excipients: Suitable dermatologically acceptable excipients for implementing embodiments of the invention include, but are not limited to, preservatives, emollients, emulsifiers, surfactants, moisturizers, thickeners, conditioners, mattifying agents, stabilizers, antioxidants, texturizing agents, shine agents, filmogenic agents, solubilizers, pigments, colorants, perfumes, and solar filters. These excipients are preferably chosen from among the group consisting of amino acids and their derivatives, polyglycerols, esters, polymers and cellulose derivatives, lanoline derivatives, phospholipids, lactoferrins, lactoperoxidases, sucrose-based stabilizers, vitamin E and its derivatives, natural and synthetic waxes, vegetable oils, triglycerides, insaponifiables, phytosterols, plant esters, silicones and their derivatives, protein hydrolysates, jojoba oil and its derivatives, lipo/hydrosoluble esters, betaines, aminoxides, saccharose ester plant extracts, titanium dioxides, glycines, parabens, and even more preferably from among the group consisting of butylene glycol, glycol-15 stearyl ether, cetearyl alcohol, phenoxyethanol, methylparaben, propylparaben, butylparaben, butylenes glycol, natural tocopherols, glycerine, dihydroxycetyl sodium phosphate, isopropyl hydroxycetyl ether, le glycol stearate, triisononanoin, octyl cocoate, polyacrylamide, isoparaffin, laureth-7, carbomer, propylene glycol, glycerol, bisabolol, dimethicone, sodium hydroxide, PEG 30-dipolyhydroxysterate, capric/caprylic triglycerides, cetearyl octanoate, dibutyl adipate, grapeseed oil, jojoba oil, magnesium sulfate, EDTA, cyclomethicone, xanthan gum, citric acid, sodium lauryl sulfate, mineral waxes and oils, isostearyl isostearate, dipelargonate of propylene glycol, isostearate of propylene glycol, PEG 8, beeswax, glyceride of hydrogenated palm kernel oil, lanolin oil, sesame oil, cetyl lactate, lanolin alcohol, titanium dioxide, lactose, saccharose, low-density polyethylene, and isotonic salt solution.

[0835] In one example, the dermatological composition as defined herein may contain at least one other active agents and/or excipients and/or additives of pharmaceutical, especially dermatological, interest such as agents with the following properties:
[0836] wound-healing properties; such as panthenol and derivatives thereof, for example ethyl panthenol, aloe vera, pantothenic acid and derivatives thereof, allantoin, bisabolol, and dipotassium glycyrrhizinate;
[0837] anti-inflammatory properties: such as steroidal and non-steroidal antiinflammatories, in particular Inhibitors of the production of cytokines and chemokines, of cyclooxygenase, of nitric oxide (NO) and nitric oxide synthase (NOS). As an example of anti-inflammatory products, mention may be made of extracts of Ginkgo biloba, trilactone terpenes such as ginkgolides, especially ginkgolide B and bilobalide known for their platelet-activating factor (PAF) antagonist properties.

[0838] The CTFA Cosmetic Ingredient Handbook, Second Edition (1992), which is hereby incorporated by reference in its entirety, describes different cosmetic and pharmaceutical ingredients currently used in the cosmetic and pharmaceutical industry that are particularly adapted to topical use and which may be used in a dermatological composition of the invention. Examples of these types of ingredients include but are not limited to the following compounds: abrasives, absorbent compounds, compounds with aesthetic purposes such as perfumes, pigments, colorants, essential oils, astringents, etc. (for example: clove oil, menthol, camphor, eucalyptus oil, eugenol, menthyl lactate, and hamelis distillate), anti-acne agents, anti-flocculant agents, anti-foaming agents, anti-microbial agents (for example iodopropyl butylcarbamate), les antioxidants, bonding agents, biological additives, tampon agents, swelling agents, chelatants, additives, biocidal agents, denaturants, external analgesics, film-forming materials, polymers, opacifying agents, pH adjusters, reducing agents, depigmenting or lightening agents (for example: hydroquinone, kojic acid, ascorbic acid, magnesium ascorbyl phosphate, ascorbyl glucosamine), conditioning agents (for example: humectants), calming agents for the skin and/or scarring agents (for example: panthenol and its derivatives, for example ethyl panthenol), aloe vera, pantothenic acid and its derivatives, allantoin, bisabolol and dipotassium glycyrrhizinate), thickeners, vitamins, and the derivatives or equivalents of these.

[0839] In one aspect, the present disclosure provides a pharmaceutical association or combination as defined herein or a dermatological composition as defined herein for use in converting a neoplastic skin cell (i.e. any cell belonging to the fibroblast lineage as defined herein) into a non-neoplastic skin cell, in particular into a functional and/or healthy skin cell.

[0840] In one aspect, the present disclosure provides a pharmaceutical association or combination as defined herein or a dermatological composition as defined herein for use in protecting (i.e. preventing and/or treating) a subject or patient from a skin neoplastic disease, disorder or condition, in particular, but not limited to, basal and squamous cell skin cancers, melanoma skin cancer, Merkel cell carcinoma, lymphoma of the skin and Kaposi sarcoma.

[0841] Suitable as amounts of pharmaceutical association for implementing embodiments of the invention in the dermatological field include the group consisting of between about 0.0001 □g/day to about 5000 mg/day, between about 0.0001 □g/day to about 1000 mg/day, between about 0.0001 □g/day to about 10 mg/day, between about 0.0001 □g/day to about 1 mg/day, or between about 0.0001 □g/day to about 100 □g/day, all being preferred for implementing embodiments of the invention.

[0842] Advantageously, the subject who has need thereof is a subject chosen from a population having an average age of more than 30 years old or who has had sunlight over-exposure, has a family history of skin cancer, has or has had certain other skin conditions or previous radiotherapy, has been exposed to certain chemicals and has a weakened immune system.

### XI. Ophthalmic Applications

[0843] Preferable dosage forms for the pharmaceutical association, combination or composition as defined herein for treating ophthalmic neoplastic diseases, disorders or conditions include, for example, in certain embodiments, eye drops and eye ointments. These can be prepared using conventional techniques. For instance, eye drops may be prepared, using isotonic agents such as sodium chloride, buffers such as sodium phosphate, and preservatives such as benzalkonium chloride. A suitable pH is within an ophthalmologically acceptable range. Preferred pH is within pH 4 to 8.

[0844] Particularly preferred administration routes include vitreal, intraocular and intra-tumoral.

[0845] A suitable dose of pharmaceutical association, combination or composition for treating eye disorders is appropriately selected, depending on the symptoms, age of patients, dosage form and the like. For eye drops, suitable concentration may be 0.0001 to 10 w/v %, preferably 0.0001 to 0.01 w/v % for administration into eyes once or several times a day.

### XII. Surgical Treatments

[0846] In one aspect, the pharmaceutical association, combination or composition as defined herein may be used in a surgical method suitable for treating or preventing a neoplastic disease such as a tumour or a cancer.

[0847] In one aspect, the present disclosure provides a surgical method for surgical treatment of a neoplastic disease comprising the provision of a pharmaceutical association, combination or composition as defined herein, and the contacting or administration of said pharmaceutical association, combination or composition with a body part of a patient to be treated.

[0848] For example, in certain embodiments, the surgical treatment of the invention may include the provision of a placement, insertion or depositing device and the contacting of said pharmaceutical association, combination or composition with a body part of a patient using said placement, insertion or depositing device.

[0849] In one example, said placement, insertion or depositing device comprises an injection device such as a syringe, and comprises the positioning of said pharmaceutical association, combination or composition inside said injection device for injection into a subject/patient or into a body part of a subject/patient.

### XIII. Pharmaceutical Applications, Uses and Methods

[0850] The present invention provides for uses and methods of converting or inducing the conversion or the recoding of a neoplastic cell (e.g. a cancer cell) into a non-neoplastic cell (e.g. a non-cancerous cell) through extracellular, non-mutagenic, conversion or recoding of said neoplastic cell. In other words, the present disclosure provides methods for a neoplastic cell to perform self-healing or self-recovery into a more functional, healthy, non-neoplastic cell.

[0851] Conveniently, such a self-healing process is generally achieved within less than 7 days. In particular, such a self-healing process is generally achieved within less than 6 days. In particular, such a self-healing process is generally achieved within less than 5 days. In particular, such a self-healing process is generally achieved within less than 4 days. In particular, such a self-healing process is generally achieved within less than 3 days. In particular, such a self-healing process is generally achieved within less than 2 days. In particular, such a self-healing process is generally achieved within less than 24 hours. In particular, such a self-healing process is generally achieved within less than 18 hours.

[0852] Conveniently, such a self-healing process is achieved with a cell conversion yield greater than about 50%. In particular, such a self-healing process is achieved with a cell conversion yield greater than about 60%. In particular, such a self-healing process is achieved with a cell conversion yield greater than about 70%. In particular, such a self-healing process is achieved with a cell conversion yield greater than about 80%. In particular, such a self-healing process is achieved with a cell conversion yield greater than about 90%. In particular, such a self-healing process is achieved with a cell conversion yield greater than about 95%. In particular, such a self-healing process is achieved with a cell conversion yield is about 100%.

[0853] Cell conversion yield: As used herein, “cell conversion yield” means the percentage of neoplastic cells that are transformed into non-neoplastic cells. It is considered significant when it is higher than 10%.

[0854] There are many ways to measure a cell conversion yield, but for the purpose of the present disclosure, and for the avoidance of any doubts, the cell conversion yield is herein measured by using a haemocytometer for precise cell counting using, for instance, a haemocytometer from Baxter Scientific and following the standard procedure below:
[0855] (a) Cleaning the chamber and cover slip with alcohol. Drying and fixing the coverslip in position.
[0856] (b) Harvesting the cells. Adding 10 μL of the cells to the haemocytometer.
[0857] (c) Placing the chamber in the inverted microscope under a 10× objective. Using phase contrast to distinguish the cells.
[0858] (d) Counting the cells in the large, central gridded square (1 mm²). The gridded square is circled in the graphic below. Multiplying by 10⁴ to estimate the number of cells per mL.
[0859] (e) Preparing duplicate samples and averaging the count.

[0860] In certain embodiments, the present disclosure provides methods to convert a neoplastic cell into a non-neoplastic cell, wherein said obtained neoplastic cell is homogeneous and/or of substantially the same differentiation state. Conveniently, the converted non-neoplastic cells obtained using a method as defined herein, have a homogeneity of greater than 20%. In particular, the converted non-neoplastic cells obtained using a method as defined herein, have a homogeneity of greater than 50%. In particular, the converted non-neoplastic cells obtained using a method as defined herein, have a homogeneity of greater than 70%. In particular, the converted non-neoplastic cells obtained using a method as defined herein, have a homogeneity of greater than 90%. In particular, the converted non-neoplastic cells obtained using a method as defined herein, have a homogeneity of greater than 99%.

[0861] Homogeneous: As used herein, “homogeneous”, when used in relation to a non-neoplastic cell population obtained using methods as defined herein, means that substantially all of the obtained non-neoplastic cells within the population are in a G0 phase. There are many ways to test and measure the homogeneity of a cell population, but for the purpose of the present disclosure, and for the avoidance of any doubts, the cell homogeneity is herein measured using cell immunofluorescence staining by detecting phosphorylation of the Rb protein, an absence of phosphorylation meaning that substantially all cells are in a G0 phase.

[0862] Conveniently, the converted non-neoplastic cells obtained using a method as defined herein, are more than 20% identical. In particular, the converted non-neoplastic cells obtained using a method as defined herein, are more than 50% identical. In particular, the converted non-neoplastic cells obtained using a method as defined herein, are more than 70% identical. In particular, the converted non-neoplastic cells obtained using a method as defined herein, are more than 90% identical. In particular, the converted non-neoplastic cells obtained using a method as defined herein, are more than 99% identical.

[0863] As used herein, “substantially the same differentiation state” or “substantially identical differentiation state”, when used in relation to non-neoplastic cells obtained using methods as defined herein, means exhibiting the same gene expression pattern. There are many ways to test and measure the differentiation state of a cell and group of cells, but for the purpose of the present disclosure, and for the avoidance of any doubts, the differentiation state of a cell or a group of cell is herein measured using RT-PCR for the quantification of the expression of well-defined marker genes for the particular differentiation state.

[0864] In certain aspects, a pharmaceutical association, combination or composition as defined herein is thus useful in the protection of a subject/patient from (e.g. in the treatment and/or prevention of) a neoplastic disease, condition, disorder or pathology and/or at least one symptom thereof such as tumors and cancers. In one aspect, the present disclosure provides a pharmaceutical association, combination or (therapeutic, dermatologic, ophthalmologic, diagnostic, etc.) composition defined herein for use in the treatment of a neoplastic disease, condition, disorder or pathology and/or at least one symptom thereof, said composition comprising a GFR-binding compound and a bioactive carrier, all as already defined herein. Also provided is a method of treating a neoplastic disease, comprising administering to a subject in need thereof an effective amount of a pharmaceutical association, combination or (therapeutic, dermatologic, ophthalmologic, diagnostic, etc.) composition as defined herein.

[0865] In one aspect, the present disclosure provides a pharmaceutical association, combination or (therapeutic, dermatologic, ophthalmologic, diagnostic, etc.) composition defined herein for use in a method of converting or recoding a neoplastic cell to induce and/or promote and/or improve self-healing and/or self-recovery thereof. Also provided is a method of converting or recoding a neoplastic cell to induce and/or promote and/or improve self-healing and/or self-recovery thereof, comprising administering to a subject in need thereof an effective amount of a pharmaceutical association, combination or (therapeutic, dermatologic, ophthalmologic, diagnostic, etc.) composition as defined herein.

[0866] In one example, the conversion or recoding of the neoplastic cell into a non-neoplastic cell is substantially permanent. As used herein, the term “permanent”, when used in relation to the conversion or recoding of a neoplastic cell into a non-neoplastic cell, means physiologically permanent conversion as the neoplastic cell treated by the method of the invention then becomes a normal, functional, healthy cell just like any other non-neoplastic cell of the subject's body and is thus not prevented to develop a new neoplastic state or any other abnormal state in the future (like any normal cell could/would).

[0867] In one aspect, the present disclosure provides a pharmaceutical association, combination or (therapeutic, dermatologic, ophthalmologic, diagnostic, etc.) composition defined herein for use in a method of restoring the ability of a neoplastic cell to undergo differentiation. Also provided is a method of restoring the ability of a neoplastic cell to undergo differentiation, comprising administering to a subject in need thereof an effective amount of a pharmaceutical association, combination or (therapeutic, dermatologic, ophthalmologic, diagnostic, etc.) composition as defined herein.

[0868] In one aspect, the present disclosure provides a pharmaceutical association, combination or (therapeutic, dermatologic, ophthalmologic, diagnostic, etc.) composition defined herein for use in a method of converting and/or recoding a circulating or non-circulating neoplastic cell such as a metastatic or non-metastatic cancer cell, into a non-neoplastic cell. Also provided is a method of converting and/or recoding a circulating or non-circulating neoplastic cell such as a metastatic or non-metastatic cancer cell, into a non-neoplastic cell, comprising administering to a subject in need thereof an effective amount of a pharmaceutical association, combination or (therapeutic, dermatologic, ophthalmologic, diagnostic, etc.) composition as defined herein.

[0869] In one aspect, the present disclosure provides a pharmaceutical association, combination or (therapeutic, dermatologic, ophthalmologic, diagnostic, etc.) composition defined herein for use in a method of providing and/or producing and/or inducing the formation of a physiologically functional and/or healthy cell of the bone, cartilage, vascular, blood, fibroblast, muscle, neural, epithelial, renal, retinal cell lineage from a neoplastic cell. Also provided is a method of providing and/or producing and/or inducing the formation of a physiologically functional and/or healthy cell of the bone, cartilage, vascular, blood, fibroblast, muscle, neural, epithelial, renal, retinal cell lineage from a neoplastic cell, comprising administering to a subject in need thereof an effective amount of a pharmaceutical association, combination or (therapeutic, dermatologic, ophthalmologic, diagnostic, etc.) composition as defined herein.

[0870] In one aspect, the present disclosure provides a pharmaceutical association, combination or (therapeutic, dermatologic, ophthalmologic, diagnostic, etc.) composition defined herein for use in a method of inducing and/or promoting and/or enhancing neoplastic cell differentiation. Also provided is a method of inducing and/or promoting and/or enhancing neoplastic cell differentiation, comprising administering to a subject in need thereof an effective amount of a pharmaceutical association, combination or (therapeutic, dermatologic, ophthalmologic, diagnostic, etc.) composition as defined herein.

[0871] In one aspect, the present disclosure provides a pharmaceutical association, combination or (therapeutic, dermatologic, ophthalmologic, diagnostic, etc.) composition defined herein for use in a method of non-mutagenically protecting a subject from a neoplastic disease i.e. without modifying or altering the genome of the treated neoplastic cells. Also provided is a method of non-mutagenically protecting a subject from a neoplastic disease i.e. without modifying or altering the genome of the treated neoplastic cells, comprising administering to a subject in need thereof an effective amount of a pharmaceutical association, combination or (therapeutic, dermatologic, ophthalmologic, diagnostic, etc.) composition as defined herein.

[0872] In one aspect, the present disclosure provides a pharmaceutical association, combination or (therapeutic, dermatologic, ophthalmologic, diagnostic, etc.) composition defined herein for use in a method of extracellular treatment of a neoplastic disease, disorder, condition, pathology, or any symptoms thereof. Also provided is a method of extracellular treatment of a neoplastic disease, disorder, condition, pathology, or any symptoms thereof, comprising administering to a subject in need thereof an effective amount of a pharmaceutical association, combination or (therapeutic, dermatologic, ophthalmologic, diagnostic, etc.) composition as defined herein.

[0873] An extracellular treatment as used herein implies a biological action/effect to be provided or to occur outside the cell to be treated (i.e. a neoplastic cell). In other words, the biologically active agent (e.g. the pharmaceutical association, combination or composition as defined herein) delivers/provides its biological/pharmaceutical effect to the outside of the cell (e.g. on the cell's surface) without the need to penetrate through the cell membrane, inside the neoplastic cell to be treated. Once the extracellular action/effect has been administered/delivered to the cell to be treated, said active agent may be, for instance, excreted from the host organism with or without being metabolised, and/or tagged to be destroyed through apoptotic routes, and/or internalised by nearby cells, etc. . . . . Without being bound to any specific theory, it is believed that once the extracellular biological action/effect/message/signal has been delivered by the pharmaceutical association or composition defined herein to a neoplastic cell to be treated, said cell then undergo self-healing into a functional, healthy, non-neoplastic cell.

[0874] Data have shown (FIG. 8) that the administration or action of the pharmaceutical association or composition as defined herein on neoplastic cells to be treated, implicates and down-regulates (in particular, reduces, substantially reduces or suppress) the Ras/MAP kinase, FAK/Src kinase and/or PIP2 signalling pathways. Without wishing to be bound to any specific theory, it is conventionally known that these pathways control the expression of cyclins D, which in turn controls the activity of CDKs 4 and/or 6 so that down-regulating (in particular, reducing, significantly reducing or suppressing) the Ras/MAP kinase, FAK/Src kinase and/or PIP2 pathways would inhibit, reduce, damper or suppress the expression of cyclins D and/or CDK4 and CDK6 and/or the formation of the cyclins D-CDK4/6 complexes.

[0875] As already stated herein, cell cycle comprises four main phases: The S phase for DNA duplication, followed by a G2 phase for preparation of the entry into the M phase, the M or mitotic phase wherein the cell divides and finally the G1 phase for cell growth. During the G1 phase the cell makes decisions on whether to continue the cell cycle and undergo cell growth and further divide, or to exit the cycle in the G0 phase and remains quiescent, die or initiate differentiation. The progression through the cell cycle is governed by phosphorylation signals emitted by different bimolecular complexes composed of CDKs and cyclin proteins, both as defined herein.

[0876] The cyclin D-CDK4/6 complexes are capable of leading a cell through the restriction (R)-point which is generally known for controlling the passage of the cell from the G1 phase to the S phase of the cell cycle. This control gate is generally thought to be located at the end of the cell cycle's G1 phase, just before entry into S phase, and is involved in the decision of whether the cell should divide or proliferate, delay division, or enter the G0 resting state.

[0877] This control gate ensures that a series of surveillance or monitoring mechanisms are completed successfully before proceeding through to the next phase. These monitoring mechanisms are also commonly termed “checkpoints” or “checkpoint controls”. If a checkpoint is not validated by the control gate, the cell should halt further advance through the cell cycle and enter the G0 phase. However, neoplastic cells, such as cancer cells, have developed mechanisms that somehow “disconnect” or “impair” one or more checkpoints from the control gate so that the cell is “tricked to “believe that all checkpoints are validated (or, in other words, “tricked to ignore” the non-validated status of relevant checkpoints) and thus never or rarely enter into the G0 phase.

[0878] Without wishing to be bound to any specific theory, it is thought that the pharmaceutical associations, combination or composition as defined herein can restore or re-establish (the integrity of) one or more impaired cell cycle checkpoints so as to restore the lost ability of a neoplastic cell to detect a malfunction or a defect in the cell cycle regulation, induce the cell cycle arrest and exit the cell cycle in G0.

[0879] One particular checkpoint that the present invention is able to restore is the adhesion checkpoint. In one aspect, the present disclosure provides a pharmaceutical association, combination or (therapeutic, dermatologic, ophthalmologic, diagnostic, etc.) composition defined herein for use in a method of treating a neoplastic cell or a neoplastic disease by restoring the adhesion checkpoint of said neoplastic cell.

[0880] The cell adhesion checkpoint is known to be in charge of monitoring the cells attachments to the extracellular matrix (ECM). When a cell does not detect a “correct” attachment it should halt further advance through the cell cycle and enter the Go phase. The ECM attachment is normally achieved via cell transmembrane proteins, such as the integrins, syndecans and different proteoglycans. The most important among these are the integrins, which assemble as alpha-beta heterodimers. In addition to physically linking the cell to the extracellular matrix, the binding of the extracellular integrin domains to specific components of the ECM activates the integrins and allows binding of different signalling molecules to its intracellular domain. This activates various signalling pathways that mediate signals to the adhesion checkpoint including the Ras/MAP kinase, FAK/Src kinase, and PIP2 pathways. These pathways are involved in the regulation of the expression of cyclins D, which in turn controls the activity of CDK4/6. The cyclins D-CDK4/6 complexes are capable of leading the cell through the R-point gate.

[0881] Data have also shown (FIGS. 8 and 9) that the administration or action of the pharmaceutical association or composition as defined herein on neoplastic cells to be treated down-regulated (in particular, substantially reduced) the expression of FAK genes and proteins and/or MAP kinase and/or reduced (in particular, substantially reduced) the expression or activity of GTPase Ras, Rho (Rho, Rac, Cdc42).

[0882] Focal Adhesion Kinase (FAK) is a cytoplasmic tyrosine kinase that plays a role in integrin-mediated signal transductions and also participates in signalling via other cell surface receptors. FAK is typically located in structures known as focal adhesions. These are multi-protein structures that link the extracellular matrix (ECM) to the cytoplasmic cytoskeleton. FAK is known to be phosphorylated in response to integrin engagement, growth factor stimulation, and the action of mitogenic neuropeptides. This cytosolic kinase has been reported to participate to diverse cellular mechanisms including cell locomotion, mitogen response and cell survival. FAK has four defined regions, or tertiary structure domains. Two of these domains, the N-terminal FERM domain and the Kinase domain, form an auto-inhibitory interaction. This interaction is thought to be the result of hydrophobic interactions between the two domains and prevents the activation of the Kinase domain, thereby preventing the signalling function of FAK. Release of this auto-inhibitory interaction has been shown to occur within focal adhesions but not in the cytoplasm and therefore is thought to require interaction with focal adhesion proteins.

[0883] MAP kinase Mitogen-activated protein kinases or MAP kinases (or MAPK) include a large group of related serine/threonine eukaryotic protein kinases whose regulatory cell functions include proliferation, gene expression, differentiation, mitosis, cell survival, and apoptosis. All have been reported to become activated when they have been phosphorylated at a Tyrosine and a Threonine amino acid. MAP kinases are catalytically inactive in their basic form. In order to become active, (potentially multiple) phosphorylation events is required to occur in their activation loops. MAP kinases typically form multi-step pathways, receiving input signals at several levels above the actual MAP kinase. These pathways can effectively convey stimuli from the cell membrane to the nucleus or to many other subcellular targets.

[0884] GTPases (singular GTPase) are a large family of hydrolase enzymes that can bind and hydrolyze guanosine triphosphate (GTP). The GTP binding and hydrolysis takes place in the highly conserved G domain common to all GTPases. The hydrolysis of the γ phosphate of GTP into guanosine diphosphate (GDP) and Pi, inorganic phosphate, occurs by the SN2 mechanism of nucleophilic substitution via a pentavalent intermediate state and is dependent on the magnesium ion Mg²⁺. Regulatory GTPases, also called the GTPase superfamily, are GTPases used for regulation of other biochemical processes. Most prominent among the regulatory GTPases are the G proteins. Small GTPases have a molecular weight of about 21 kDa and generally serve as molecular switches for a variety of cellular signalling events.

[0885] According to their primary amino acid sequences and biochemical properties, the Ras superfamily is further divided into five subfamilies: Ras, Rho, Rab, Arf and Ran. The Rho subfamily is further divided into RHOA, RAC1, and CDC42.

[0886] Ras/MAP kinase signalling pathway (also known as the Ras-Raf-MEK-ERK pathway) is a chain of proteins in the cell that communicates a signal from a receptor on the surface of the cell to the DNA in the nucleus of the cell. The signal starts when a signalling molecule binds to the receptor on the cell surface and ends when the DNA in the nucleus expresses a protein and produces some change in the cell, such as cell division. The pathway includes many proteins, including MAPK (mitogen-activated protein kinases, originally called ERK, extracellular signal-regulated kinases), which communicate by adding phosphate groups to a neighbouring protein.

[0887] The FAK/Src kinase signalling pathway involves focal adhesion kinase (FAK) and steroid receptor coactivator (Src) which are intracellular (non-receptor) tyrosine kinases that physically and functionally interact to promote a variety of cellular responses. The linked activities of these two kinases are a common intracellular point of convergence in the signalling initiated by the integrin-extracellular matrix (ECM) interaction. Integrins, a family of transmembrane receptors, interact with the ECM and the intracellular actin-cytoskeleton. The integrins cluster upon binding to the ECM to form focal adhesion (FA) contacts. In response to this clustering, FAK associates to the cytoplasmic tail of the integrins and undergoes phosphorylation at its tyrosine 397 residue (Y397). This phosphorylated tyrosine provides a docking site for Src which is then able to phosphorylate additional sites on FAK, leading to a further increase in FAK activity and allowing the recruitment of proteins that contain Src homology 2 (SH2) domains such as Grb2 and PI3K. The mutually activated FAK/Src complex then initiates a cascade of phosphorylation events of new protein-protein interactions to trigger several signalling pathways that eventually leads to different cellular responses.

[0888] Phosphatidylinositol 4,5-bisphosphate or PIP2 is a minor phospholipid component of cell membranes. PIP2 is enriched at the plasma membrane where it is a substrate for a number of important signalling proteins. PIP2 is phosphorylated by the Class I PI 3-kinases. Class I PI 3-kinases are a subgroup of the enzyme family, phosphoinositide 3-kinase that possess a common protein domain structure, substrate specificity, and method of activation. Class I PI 3-kinases are further divided into two subclasses, class IA PI 3-kinases and class IB PI 3-kinases. Class IA PI 3-kinases are activated by receptor tyrosine kinases (RTKs). Class IB PI3-kinases are activated by G-protein-coupled receptors (GPCRs). After their activation these kinases phosphorylate PIP2 to form phosphatidylinositol (3,4,5)-trisphosphate PIP3. Both PIP2 and PIP3 not only act as substrates for enzymes but also serve as docking phospholipids that bind specific domains that promote the recruitment of proteins to the plasma membrane and subsequent activation of signalling cascades. PIP3 functions to activate downstream signalling components, the most notable one being the protein kinase AKT, which activates downstream anabolic signalling pathways required for cell growth and survival.

[0889] Consequently, any associations, combinations or compositions comprising a GFR-binding compound and a bioactive carrier as defined herein, which, when used to convert a neoplastic cell into a non-neoplastic cell and treat/prevent/diagnose a neoplastic disease, down-regulate (in particular, substantially reduce) the expression of FAK genes and proteins and/or MAP kinase and/or reduce (in particular, substantially reduce) the expression or activity of GTPase Ras, Rho (Rho, Rac, Cdc42) in-vitro or in-vivo, shall be considered as being comprised within the scope of the present invention.

[0890] In one aspect, the present disclosure provides a pharmaceutical association, combination or (therapeutic, dermatologic, ophthalmologic, diagnostic, etc.) composition defined herein for use in a method of treating a neoplastic cell or a neoplastic disease by down-regulating (in particular, substantially reducing) the expression of FAK genes and proteins and/or MAP kinase and/or reducing (in particular, substantially reducing) the expression or activity of GTPase Ras, Rho (Rho, Rac, Cdc42) in-vitro or in-vivo. Also provided is a method of treating a neoplastic cell or a neoplastic disease by down-regulating (in particular, substantially reducing) the expression of FAK genes and proteins and/or MAP kinase and/or reducing (in particular, substantially reducing) the expression or activity of GTPase Ras, Rho (Rho, Rac, Cdc42) in-vitro or in-vivo, comprising administering to a subject in need thereof an effective amount of a pharmaceutical association, combination or (therapeutic, dermatologic, ophthalmologic, diagnostic, etc.) composition as defined herein.

[0891] Consequently, in certain embodiments, any associations, combinations or compositions comprising a GFR-binding compound and a bioactive carrier as defined herein, which, when used to convert a neoplastic cell into a non-neoplastic cell and treat/prevent a neoplastic disease, possesses at least one, preferably more than one, of the above defined biological and/or therapeutic parameters or effects (e.g. down-regulation of the Ras/MAP kinase, FAK/Src kinase and/or PIP2 signalling pathways and/or inhibition of gene expression or formation of cyclins D and/or down-regulation of the cyclin D/CDKs complexes), shall be considered as being comprised within the scope of the present invention.

[0892] In one aspect, the present disclosure provides a pharmaceutical association, combination or (therapeutic, dermatologic, ophthalmologic, diagnostic, etc.) composition defined herein for use in a method of converting a neoplastic cell into a non-neoplastic cell or treating/preventing a neoplastic disease by substantially inhibiting, down-regulating or dampening the gene expression or formation of at least one of, in particular a plurality of, the cyclin D proteins. Also provided is a method of converting a neoplastic cell into a non-neoplastic cell or treating/preventing a neoplastic disease by substantially inhibiting, down-regulating or dampening the gene expression or formation of at least one of, in particular a plurality of, the cyclin D proteins, comprising administering to a subject in need thereof an effective amount of a pharmaceutical association, combination or (therapeutic, dermatologic, ophthalmologic, diagnostic, etc.) composition as defined herein.

[0893] In one aspect, the present disclosure provides a pharmaceutical association, combination or (therapeutic, dermatologic, ophthalmologic, diagnostic, etc.) composition defined herein for use in a method of converting a neoplastic cell into a non-neoplastic cell or treating/preventing a neoplastic disease by substantially inhibiting the formation of at least one of, in particular a plurality of, the protein complexes comprising at least one cyclin D and at least one CDK4 or CDK6. Also provided is a method of converting a neoplastic cell into a non-neoplastic cell or treating/preventing a neoplastic disease by substantially inhibiting the formation of at least one of, in particular a plurality of, the protein complexes comprising at least one cyclin D and at least one CDK4 or CDK6, comprising administering to a subject in need thereof an effective amount of a pharmaceutical association, combination or (therapeutic, dermatologic, ophthalmologic, diagnostic, etc.) composition as defined herein.

[0894] In one aspect, the present disclosure provides a pharmaceutical association, combination or (therapeutic, dermatologic, ophthalmologic, diagnostic, etc.) composition as defined herein for use in a method of converting a neoplastic cell into a non-neoplastic cell or treating/preventing a neoplastic disease without inducing the death of said neoplastic cell. Also provided is a method of converting a neoplastic cell into a non-neoplastic cell or treating/preventing a neoplastic disease without inducing the death of said neoplastic cell, comprising administering to a subject in need thereof an effective amount of a pharmaceutical association, combination or (therapeutic, dermatologic, ophthalmologic, diagnostic, etc.) composition as defined herein.

[0895] In one aspect, the present disclosure provides a pharmaceutical association, combination or (therapeutic, dermatologic, ophthalmologic, diagnostic, etc.) composition as defined herein for use as a G0 cell cycle phase inducer.

[0896] In one aspect, the present disclosure provides a pharmaceutical association, combination or (therapeutic, dermatologic, ophthalmologic, diagnostic, etc.) composition for use in a method of converting a neoplastic cell into a non-neoplastic cell or treating/preventing a neoplastic disease by dampening or arresting cell division and/or cell proliferation of said neoplastic cell. Also provided is a method of converting a neoplastic cell into a non-neoplastic cell or treating/preventing a neoplastic disease by dampening or arresting cell division and/or cell proliferation of said neoplastic cell, comprising administering to a subject in need thereof an effective amount of a pharmaceutical association, combination or (therapeutic, dermatologic, ophthalmologic, diagnostic, etc.) composition as defined herein.

[0897] In one aspect, the present disclosure provides a pharmaceutical association, combination or (therapeutic, dermatologic, ophthalmologic, diagnostic, etc.) composition for use in a method of converting a neoplastic cell into a non-neoplastic cell or treating/preventing a neoplastic disease by activating and/or promoting anti-mitogen activity and/or tumor suppressor pathways and/or anti-oncogenic activity in said neoplastic cell. Also provided is a method of converting a neoplastic cell into a non-neoplastic cell or treating/preventing a neoplastic disease by activating and/or promoting anti-mitogen activity and/or tumor suppressor pathways and/or anti-oncogenic activity in said neoplastic cell, comprising administering to a subject in need thereof an effective amount of a pharmaceutical association, combination or (therapeutic, dermatologic, ophthalmologic, diagnostic, etc.) composition as defined herein.

[0898] Data have also shown (FIG. 9) that the administration or action of the pharmaceutical association, combination or composition as defined herein on neoplastic cells to be treated, down-regulated (in particular, substantially reduced) the expression of paxillin and/or up-regulated (in particular, substantially increased) the expression of vinculin.

[0899] Paxillin is a signal transduction adaptor protein. The C-terminal region of paxillin contains four LIM domains that target paxillin to focal adhesions through a direct association with the cytoplasmic tail of beta-integrin. The N-terminal region of paxillin is rich in protein-protein interaction sites. The proteins that bind to paxillin are diverse and include protein tyrosine kinases, such as Src and focal adhesion kinase (FAK), structural proteins, such as vinculin and actopaxin, and regulators of actin organization, such as COOL/PIX and PKL/GIT. Paxillin is tyrosine-phosphorylated by FAK and Src upon integrin engagement or growth factor stimulation, creating binding sites for the adapter protein Crk.

[0900] Vinculin is a focal adhesion protein that is involved in linkage of integrin adhesion molecules to the actin cytoskeleton. Vinculin is a cytoskeletal protein associated with cell-cell and cell-matrix junctions, where it is thought to function as one of several interacting proteins involved in anchoring F-actin to the membrane. Vinculin is a 117-kDa cytoskeletal protein of 1066 amino acids. The protein contains an acidic N-terminal domain and a basic C-terminal domain separated by a proline-rich middle segment. Vinculin consists of a globular head domain that contains binding sites for talin and α-actinin as well as a tyrosine phosphorylation site, while the tail region contains binding sites for F-actin, paxillin, and lipids.

[0901] Consequently, any associations, combinations or compositions comprising a GFR-binding compound and a bioactive carrier as defined herein, which, when used to convert a neoplastic cell into a non-neoplastic cell and treat/prevent/diagnose a neoplastic disease, down-regulate the expression of paxillin and/or (preferably and) up-regulate the expression of vinculin in-vitro or in-vivo, shall be considered as being comprised within the scope of the present invention.

[0902] In one aspect, the present disclosure thus provides a pharmaceutical association, combination or (therapeutic, dermatologic, ophthalmologic, diagnostic, etc.) composition defined herein for use in a method of treating a neoplastic cell or a neoplastic disease by down-regulating the expression of paxillin and/or (preferably and) up-regulating the expression of vinculin in-vitro or in-vivo. Also provided is a method of treating a neoplastic cell or a neoplastic disease by down-regulating the expression of paxillin and/or (preferably and) up-regulating the expression of vinculin in-vitro or in-vivo, comprising administering to a subject in need thereof an effective amount of a pharmaceutical association, combination or (therapeutic, dermatologic, ophthalmologic, diagnostic, etc.) composition as defined herein.

[0903] Data have also shown (FIGS. 3 to 6) that the administration or action of the pharmaceutical association, combination or composition as defined herein on neoplastic cells to be treated, up-regulated (in particular, substantially increased) the expression of at least one differentiation genes and proteins such as ADIPOQ (ACRP30), FABP4 and/or PPARG for adipocytes; ACAN (AGC1), COL10A1, COMP, Sox9, IBSP (Sialoprotein II) and/or COL4 for chondrocytes; CDH5, KDR (VEGFR3) and/or PECAM1 for the general endothelium; DLL4, EFNB2 and/or NRP1 for the arterial endothelium; LYVE1 and/or PROX1 for the lymphatic endothelium; NR2F2 and/or NRP2 for the venous endothelium; KRT1, KRT10 and/or KRT14 for the keratinocyte epithelium; PMEL (SILV), TYR and/or TYRP1 for the melanocyte epithelium; MMP-9, α-SMA and/or Vimentin for the fibrocyte; BGLAP, COL2A1, IBSP, RANK-L, OCN, DMP-1, Sclerostin and/or MEPE for Osteoblasts/Osteocytes; CALCR and/or CTSK for Osteoclasts; ITGB4 and/or KRT19 for cholangiocytes; ALB, G6PC and/or TAT for Hepatocytes; CD79A for early B-cell development; CD3E and/or PTCRA for early T-cell development; CCR5, CXCR4 and/or EMR1 for macrophages; ITGAM for the monocytes; GALC and/or GFAP for glial cells; MAP2, NEFH and/or TUBB3 for mature neurons; CHAT for cholinergic neurons; TH for dopaminergic neurons; GAD1 and/or SLC32A1 for GABA neurons; SLC17A6 and/or SLC17A7 for glutamatergic neurons; ISL1 for motor neurons; MBP for oligodendrocytes; POU4F2 for ganglion cells; RLBP1 for Muller cells; PDE6B and/or RCVRN for photoreceptor cells; NPHS2 for podocytes; AQP1, CYP27B1 and/or MIOX for proximal tubule cells; AQP2 for collecting duct cells; UMOD for distal tubule cells; SFTPB, SFTPC and/or SFTPD for lung cells; MYH6, MYH7 and/or NPPA for cardiomyocytes; CAV3, MYH1, MYOD1, GATA4 and/or MLC1 for skeletal muscle cells; MYH11, SMTN and/or TAGLN for smooth muscle cells; GCG, MAFB and/or POU3F4 for alpha cells; INS, MAFA and/or SLC2A2 for beta cells; SST for delta cells; GHRL (Ghrelin, Obestatin) for epsilon cells; PPY for pancreatic polypeptide producing (PP) cells; and/or CPA1 for exocrine cells.

[0904] Consequently, any associations, combinations or compositions comprising a GFR-binding compound and a bioactive carrier as defined herein, which, when used to convert a neoplastic cell into a non-neoplastic cell and treat/prevent/diagnose a neoplastic disease, up-regulate (in particular, substantially increase) the expression of at least one differentiation genes and proteins such as ADIPOQ (ACRP30), FABP4, PPARG, ACAN (AGC1), COL10A1, COMP, Sox9, IBSP (Sialoprotein II), COL4, CDH5, KDR (VEGFR3), PECAM1, DLL4, EFNB2, NRP1, LYVE1, PROX1, NR2F2, NRP2, KRT1, KRT10, KRT14, PMEL (SILV), TYR, TYRP1, MMP-9, α-SMA, Vimentin, BGLAP, COL2A1, IBSP, RANK-L, OCN, DMP-1, Sclerostin, MEPE, CALCR, CTSK, ITGB4, KRT19, ALB, G6PC, TAT, CD79A, CD3E, PTCRA, CCR5, CXCR4, EMR1, ITGAM, GALC, GFAP, MAP2, NEFH, TUBB3, CHAT, TH, GAD1, SLC32A1, SLC17A6, SLC17A7, ISL1, MBP, POU4F2, RLBP1, PDE6B, RCVRN, NPHS2, AQP1, CYP27B1, MIOX, AQP2, UMOD, SFTPB, SFTPC, SFTPD, MYH6, MYH7, NPPA, CAV3, MYH1, MYOD1, GATA4, MLC1, MYH11, SMTN, TAGLN, GCG, MAFB, POU3F4, INS, MAFA, SLC2A2, SST, GHRL (Ghrelin, Obestatin), PPY and/or CPA1, in-vitro or in-vivo, shall be considered as being comprised within the scope of the present invention.

[0905] In one aspect, the present disclosure thus provides a pharmaceutical association, combination or (therapeutic, dermatologic, ophthalmologic, diagnostic, etc.) composition defined herein for use in a method of treating a neoplastic cell or a neoplastic disease by up-regulating (in particular, substantially increasing) the expression of differentiation genes and proteins such as ADIPOQ (ACRP30), FABP4, PPARG, ACAN (AGC1), COL10A1, COMP, Sox9, IBSP (Sialoprotein II), COL4, CDH5, KDR (VEGFR3), PECAM1, DLL4, EFNB2, NRP1, LYVE1, PROX1, NR2F2, NRP2, KRT1, KRT10, KRT14, PMEL (SILV), TYR, TYRP1, MMP-9, α-SMA, Vimentin, BGLAP, COL2A1, IBSP, RANK-L, OCN, DMP-1, Sclerostin, MEPE, CALCR, CTSK, ITGB4, KRT19, ALB, G6PC, TAT, CD79A, CD3E, PTCRA, CCR5, CXCR4, EMR1, ITGAM, GALC, GFAP, MAP2, NEFH, TUBB3, CHAT, TH, GAD1, SLC32A1, SLC17A6, SLC17A7, ISL1, MBP, POU4F2, RLBP1, PDE6B, RCVRN, NPHS2, AQP1, CYP27B1, MIOX, AQP2, UMOD, SFTPB, SFTPC, SFTPD, MYH6, MYH7, NPPA, CAV3, MYH1, MYOD1, GATA4, MLC1, MYH11, SMTN, TAGLN, GCG, MAFB, POU3F4, INS, MAFA, SLC2A2, SST, GHRL (Ghrelin, Obestatin), PPY and/or CPA1, in-vitro or in-vivo. Also provided is a method of treating a neoplastic cell or a neoplastic disease by up-regulating (in particular, substantially increasing) the expression of differentiation genes and proteins such as ADIPOQ (ACRP30), FABP4, PPARG, ACAN (AGC1), COL10A1, COMP, Sox9, IBSP (Sialoprotein II), COL4, CDH5, KDR (VEGFR3), PECAM1, DLL4, EFNB2, NRP1, LYVE1, PROX1, NR2F2, NRP2, KRT1, KRT10, KRT14, PMEL (SILV), TYR, TYRP1, MMP-9, α-SMA, Vimentin, BGLAP, COL2A1, IBSP, RANK-L, OCN, DMP-1, Sclerostin, MEPE, CALCR, CTSK, ITGB4, KRT19, ALB, G6PC, TAT, CD79A, CD3E, PTCRA, CCR5, CXCR4, EMR1, ITGAM, GALC, GFAP, MAP2, NEFH, TUBB3, CHAT, TH, GAD1, SLC32A1, SLC17A6, SLC17A7, ISL1, MBP, POU4F2, RLBP1, PDE6B, RCVRN, NPHS2, AQP1, CYP27B1, MIOX, AQP2, UMOD, SFTPB, SFTPC, SFTPD, MYH6, MYH7, NPPA, CAV3, MYH1, MYOD1, GATA4, MLC1, MYH11, SMTN, TAGLN, GCG, MAFB, POU3F4, INS, MAFA, SLC2A2, SST, GHRL (Ghrelin, Obestatin), PPY and/or CPA1, in-vitro or in-vivo, comprising administering to a subject in need thereof an effective amount of a pharmaceutical association, combination or (therapeutic, dermatologic, ophthalmologic, diagnostic, etc.) composition as defined herein.

[0906] Data have also shown (FIG. 7) that the administration or action of the pharmaceutical association, combination or composition as defined herein on neoplastic cells to be treated increased the phosphorylation of the protein p53.

[0907] Data have also shown (FIG. 7) that the administration or action of the pharmaceutical association, combination or composition as defined herein on neoplastic cells to be treated down-regulated (in particular, substantially decreased or suppressed) the phosphorylation of the protein pRb.

[0908] Data have also shown (FIG. 8) that the administration or action of the pharmaceutical association, combination or composition as defined herein on neoplastic cells to be treated down-regulated the protein Src.

[0909] Tumor protein p53, also known as p53, cellular tumor antigen p53, phosphoprotein p53, or tumor suppressor p53, is a protein that in humans is encoded by the TP53 gene. The p53 protein is involved in multicellular organisms, where it regulates the cell cycle and, thus, functions as a tumor suppressor, generally preventing neoplastic diseases such as cancers. As such, p53 has been described as “the guardian of the genome” because of its role in conserving stability by preventing genome mutation. TP53 is thus said to be a tumor suppressor gene.

[0910] Src is a non-receptor protein tyrosine kinase that plays a multitude of roles in cell signalling. Src is involved in the control of many functions, including cell adhesion, growth, movement and differentiation. Src is widely expressed in many cell types, and can have different locations within a cell. It appears that the subcellular location of Src can affect its function. Src can associate with cellular membranes, such as the plasma membrane, the perinuclear membrane and the endosomal membrane. At the plasma membrane, Src can transduce signals from a variety of receptors to internal signalling pathways that convey these signals to the nucleus, cytoskeleton and other cellular components. For example, Src can act through growth factor receptors to affect cell growth and proliferation. Within the nucleus, Src is thought to help regulate the cell cycle and cell division by its interactions with other proteins. For example, Src can interact with Sam68 to help regulate gene expression. In bone osteoclasts, Src acts to regulate the respiratory enzyme cytochrome C oxidase (Cox), where Src-induced phosphorylation of Cox is required for maintaining high levels of ATP to meet the cells' high energy requirements. Src can also be found in the cytoplasm, and between cells at adherens junctions, where it takes on different roles.

[0911] pRb (Retinoblastoma protein) is a tumor suppressor protein that is dysfunctional in several major cancers. One function of pRb is to prevent excessive cell growth by inhibiting cell cycle progression until a cell is ready to divide. It is also a recruiter of several chromatin remodeling enzymes such as methylases and acetylases. Rb restricts the cell's ability to replicate DNA by preventing its progression from the G1 (first gap phase) to S (synthesis phase) phase of the cell cycle. Rb binds and inhibits transcription factors of the E2F family, which are composed of dimers of an E2F protein and a dimerization partner (DP) protein. When Rb is bound to E2F, the complex acts as a growth suppressor and prevents progression through the cell cycle. Rb is phosphorylated to pRb by certain Cyclin Dependent Kinases (CDKs). pRb is described as being hyperphosphorylated and when in this state, it is unable to complex E2F and therefore, unable to restrict progression from the G1 phase to the S phase of the cell cycle. During the M-to-G1 transition, pRb is progressively dephosphorylated by PP1, returning to its growth-suppressive hypophosphorylated state Rb.

[0912] Consequently, any associations, combinations or compositions comprising a GFR-binding compound and a bioactive carrier as defined herein, which, when used to convert a neoplastic cell into a non-neoplastic cell and treat/prevent/diagnose a neoplastic disease, down-regulate (in particular, substantially decrease or suppress) the expression of genes and proteins p53 and/or Src, in-vitro or in-vivo, shall be considered as being comprised within the scope of the present invention.

[0913] In one aspect, the present disclosure thus provides a pharmaceutical association, combination or (therapeutic, dermatologic, ophthalmologic, diagnostic, etc.) composition defined herein for use in a method of treating a neoplastic cell or a neoplastic disease by down-regulating (in particular, substantially decreasing or suppressing) the expression of genes and proteins p53 and/or Src. Also provided is a method of treating a neoplastic cell or a neoplastic disease by down-regulating (in particular, substantially decreasing or suppressing) the expression of genes and proteins p53 and/or Src, comprising administering to a subject in need thereof an effective amount of a pharmaceutical association, combination or (therapeutic, dermatologic, ophthalmologic, diagnostic, etc.) composition as defined herein.

[0914] In one aspect, the present disclosure provides a pharmaceutical association, combination or (therapeutic, dermatologic, ophthalmologic, diagnostic, etc.) composition defined herein for use in a method of treating a neoplastic cell or a neoplastic disease by:
[0915] down-regulating (in particular, substantially reducing) the expression of FAK genes and proteins and/or MAP kinase; and/or
[0916] reducing (in particular, substantially reducing) the expression or activity of GTPase Ras, Rho (Rho, Rac, Cdc42); and/or
[0917] down-regulating (in particular, reducing, significantly reducing or suppressing) the Ras/MAP kinase, FAK/Src kinase and/or PIP2 signalling pathways; and/or
[0918] substantially inhibiting the formation of at least one of, in particular a plurality of, the protein complexes comprising at least one cyclin D and at least one CDK4 or CDK6; and/or
[0919] substantially inhibiting, down-regulating or dampening the gene expression or formation of at least one of, in particular a plurality of, the cyclin D proteins; and/or
[0920] down-regulating the expression of paxillin and/or (preferably and) up-regulating the expression of vinculin; and/or
[0921] up-regulating (in particular, substantially increasing) the expression of at least one of differentiation genes and proteins such as ADIPOQ (ACRP30), FABP4, PPARG, ACAN (AGC1), COL10A1, COMP, Sox9, IBSP (Sialoprotein II), COL4, CDH5, KDR (VEGFR3), PECAM1, DLL4, EFNB2, NRP1, LYVE1, PROX1, NR2F2, NRP2, KRT1, KRT10, KRT14, PMEL (SILV), TYR, TYRP1, MMP-9, α-SMA, Vimentin, BGLAP, COL2A1, IBSP, RANK-L, OCN, DMP-1, Sclerostin, MEPE, CALCR, CTSK, ITGB4, KRT19, ALB, G6PC, TAT, CD79A, CD3E, PTCRA, CCR5, CXCR4, EMR1, ITGAM, GALC, GFAP, MAP2, NEFH, TUBB3, CHAT, TH, GAD1, SLC32A1, SLC17A6, SLC17A7, ISL1, MBP, POU4F2, RLBP1, PDE6B, RCVRN, NPHS2, AQP1, CYP27B1, MIOX, AQP2, UMOD, SFTPB, SFTPC, SFTPD, MYH6, MYH7, NPPA, CAV3, MYH1, MYOD1, GATA4, MLC1, MYH11, SMTN, TAGLN, GCG, MAFB, POU3F4, INS, MAFA, SLC2A2, SST, GHRL (Ghrelin, Obestatin), PPY and/or CPA1; and/or
[0922] increasing the phosphorylation of protein p53; and/or
[0923] down-regulating (in particular, substantially decreasing or suppressing) the phosphorylation of the protein pRb; and/or
[0924] down-regulating (in particular, substantially decreasing or suppressing) the gene and protein expression of Src; and/or
[0925] not inducing the death of said neoplastic cell; and/or
[0926] dampening or arresting cell division or cell proliferation of said neoplastic cell.

[0927] In one example, the pharmaceutical association as defined herein may thus be an animal or mammal (preferably a human) anti-neoplastic disease agent (e.g. anti-cancer agent) which has demonstrated the ability to convert a neoplastic cell into a non-neoplastic cell in vitro, ex-vivo and/or in vivo and/or to protect a subject from a neoplastic disease, disorder, condition, pathology or any symptoms thereof.

[0928] In one aspect, the present disclosure also provides methods of converting a neoplastic cell into a non-neoplastic cell, said method comprising the administration to a cell, in-vitro, ex-vivo or in-vivo, of an effective amount of a pharmaceutical association, combination or composition as defined herein. In one example, said methods induce the differentiation of said neoplastic cell. In one example, said conversion is effected in less than 7 days, in less than 6 days, 5 days, 4 days, 3 days, 2 days, 24 hours or 18 hours, in particular in less than 24 hours. In other examples:
[0929] said neoplastic cell is a non-terminally differentiated cell and said methods comprise the differentiation of said non-terminally differentiated; and/or
[0930] said methods comprise the conversion and/or recoding of a neoplastic cell to induce and/or promote and/or improve self-healing and/or self-recovery thereof; and/or
[0931] said methods comprise restoring the ability of a neoplastic cell to undergo differentiation; and/or
[0932] said methods comprise converting and/or recoding a circulating or non-circulating neoplastic cell such as a metastatic or non-metastatic cancer cell, into a non-neoplastic cell; and/or
[0933] said methods comprise providing and/or producing and/or inducing the formation of a physiologically functional and/or healthy cell of the bone, chondrocyte, vascular, fibroblast, renal, retinal, neuronal, ligament, tendon, reproduction system, lung, blood, adipocyte cell lineage from a neoplastic cell; and/or
[0934] said methods comprise inducing and/or promoting and/or enhancing neoplastic cell differentiation; and/or
[0935] said methods comprise non-mutagenically protecting a subject from a neoplastic disease i.e. without modifying or altering the genome of the treated neoplastic cells; and/or
[0936] said methods comprise the extracellular treatment of a neoplastic disease, disorder, condition, pathology, or any symptoms thereof; and/or
[0937] said methods comprise down-regulating (in particular, substantially reducing) the expression of FAK genes and proteins and/or MAP kinase and/or reducing (in particular, substantially reducing) the expression or activity of GTPase Ras, Rho (Rho, Rac, Cdc42) in-vitro or in-vivo; and/or
[0938] said methods comprise restoring the cell adhesion checkpoint of said neoplastic cell; and/or
[0939] said methods comprise substantially inhibiting, down-regulating or dampening the gene expression or formation of at least one of, in particular a plurality of, the cyclin D proteins; and/or
[0940] said methods comprise substantially inhibiting the formation of at least one of, in particular a plurality of, the protein complexes comprising at least one cyclin D and at least one CDK4 or CDK6; and/or
[0941] said methods comprise not inducing the death of said neoplastic cell; and/or
[0942] said methods comprise dampening or arresting cell division and/or cell proliferation of said neoplastic cell; and/or
[0943] said methods comprise activating and/or promoting anti-mitogen activity and/or tumor suppressor pathways and/or anti-oncogenic activity in said neoplastic cell; and/or
[0944] said methods comprise down-regulating the gene expression of paxillin and/or (preferably and) up-regulating the gene expression or increasing turn-over of vinculin in-vitro or in-vivo; and/or
[0945] said methods comprise up-regulating (in particular, substantially increasing) the expression of differentiation genes and proteins such as ADIPOQ (ACRP30), FABP4, PPARG, ACAN (AGC1), COL10A1, COMP, Sox9, IBSP (Sialoprotein II), COL4, CDH5, KDR (VEGFR3), PECAM1, DLL4, EFNB2, NRP1, LYVE1, PROX1, NR2F2, NRP2, KRT1, KRT10, KRT14, PMEL (SILV), TYR, TYRP1, MMP-9, α-SMA, Vimentin, BGLAP, COL2A1, IBSP, RANK-L, OCN, DMP-1, Sclerostin, MEPE, CALCR, CTSK, ITGB4, KRT19, ALB, G6PC, TAT, CD79A, CD3E, PTCRA, CCR5, CXCR4, EMR1, ITGAM, GALC, GFAP, MAP2, NEFH, TUBB3, CHAT, TH, GAD1, SLC32A1, SLC17A6, SLC17A7, ISL1, MBP, POU4F2, RLBP1, PDE6B, RCVRN, NPHS2, AQP1, CYP27B1, MIOX, AQP2, UMOD, SFTPB, SFTPC, SFTPD, MYH6, MYH7, NPPA, CAV3, MYH1, MYOD1, GATA4, MLC1, MYH11, SMTN, TAGLN, GCG, MAFB, POU3F4, INS, MAFA, SLC2A2, SST, GHRL (Ghrelin, Obestatin), PPY and/or CPA1, in-vitro or in-vivo; and/or
[0946] said methods comprise down-regulating (in particular, substantially decreasing or suppressing) the gene expression of proteins p53, pRb and/or Src.

[0947] In one example, the pharmaceutical association as defined herein may thus be an animal or mammal (preferably a human) anti-neoplastic disease agent (e.g. anti-cancer agent) which has demonstrated the ability to convert a neoplastic cell into a non-neoplastic cell in vitro, ex-vivo and/or in vivo and/or to protect a subject from a neoplastic disease, disorder, condition, pathology or any symptoms thereof.

[0948] In one example, said administration induces the quiescence of the neoplastic cell. In one example, said administration prevents, reduces or suppresses the cell division and/or cell proliferation of said neoplastic cell. In one example, said administration regulates or promotes anti-mitogen activity and/or tumor suppressor activity and/or anti-oncogenic activity in said neoplastic cell. In one example, said method is cytostatic for the treated cell. In one example, said method is not cytotoxic for the treated cell. In one example, said method is non-mutagenic.

[0949] In one aspect, the present disclosure provides a method of producing a physiologically functional and healthy cell, comprising the administration in-vitro, ex-vivo or in-vivo to a neoplastic cell an effective amount of a pharmaceutical association or composition as defined herein and wherein said physiologically functional and healthy cell is selected from the group consisting of an osteoblast, osteocyte, chondroblast, chondrocyte, neuroblast, neurocyte, Sertoli cells, Leydig cell, Germ cell, Myoblast, Myocyte, keratinocyte, endothelial cells, angioblast, fibroblast, fibrocyte, podocyte.

[0950] In one aspect, the present disclosure provides a method of converting a cell “X” into a cell “Y”, said method comprising the administration to a neoplastic cell of an effective amount of a pharmaceutical association, combination or composition as defined herein, wherein cell X is a neoplastic cell selected from the group consisting of:
[0951] a. a metastatic or non-metastatic neoplastic cell;
[0952] b. a cell comprising at least one alteration, mutation and/or deregulation of at least one tumour suppressor gene or of at least one of their gene-encoded product (such as for example the Rb and/or P53 genes or gene products);
[0953] c. a cell comprising at least one alteration, mutation and/or deregulation of at least one of proto-oncogene or of at least one of their gene-encoded product (such as for example Src-tyrosine kinase- and/or Ras-small GTPase);
[0954] d. a cell having an impaired DNA repair mechanism (such as for example BRCA1 and BRCA2);
[0955] e. a cell comprising at least one alteration, mutation and/or deregulation of at least one mitogen and/or anti-mitogen gene or at least one of their gene-encoded products (such as for example TGF-beta);
[0956] f. a cell having an defective, altered or impaired cell cycle or cell cycle control, wherein said defective cell cycle is due to either at least one alteration, mutation and/or deregulation of at least one cell cycle gene or gene-encoded product (for example Cyclin E1, Cyclin D1, CDK 4/6) at least one alteration, mutation and/or deregulation of at least one cell cycle checkpoint or diminution or reduction of a checkpoint sensibility and/or responsiveness;
[0957] g. a stem cell-like cell comprising a Stro-1 positive marker and having multi-potency;
[0958] h. a cell comprising at least one specific differentiation marker such as ADIPOQ (ACRP30), FABP4, PPARG, ACAN (AGC1), COL10A1, COMP, Sox9, IBSP (Sialoprotein II), COL4, CDH5, KDR (VEGFR3), PECAM1, DLL4, EFNB2, NRP1, LYVE1, PROX1, NR2F2, NRP2, KRT1, KRT10, KRT14, PMEL (SILV), TYR, TYRP1, MMP-9, α-SMA, Vimentin, BGLAP, COL2A1, IBSP, RANK-L, OCN, DMP-1, Sclerostin, MEPE, CALCR, CTSK, ITGB4, KRT19, ALB, G6PC, TAT, CD79A, CD3E, PTCRA, CCR5, CXCR4, EMR1, ITGAM, GALC, GFAP, MAP2, NEFH, TUBB3, CHAT, TH, GAD1, SLC32A1, SLC17A6, SLC17A7, ISL1, MBP, POU4F2, RLBP1, PDE6B, RCVRN, NPHS2, AQP1, CYP27B1, MIOX, AQP2, UMOD, SFTPB, SFTPC, SFTPD, MYH6, MYH7, NPPA, CAV3, MYH1, MYOD1, GATA4, MLC1, MYH11, SMTN, TAGLN, GCG, MAFB, POU3F4, INS, MAFA, SLC2A2, SST, GHRL (Ghrelin, Obestatin), PPY and/or CPA1;
[0959] i. a cell having increased cytoplasmic and nuclear stiffness;
[0960] j. a cell having high cytoskeleton dynamics; and
[0961] k. any combination thereof;
   and wherein cell Y is a non-neoplastic cell selected from the group consisting of:
[0962] a. a cell in a terminal differentiation state;
[0963] b. a cell in a non-terminal differentiation state and more differentiated than the X cell;
[0964] c. a cell having a physiologically normal proliferation;
[0965] d. a physiologically functional cell having healthy or normal genes expression and proteins activity.

[0966] In one aspect, the present disclosure provides methods to activate a growth factor receptor present on the surface of a neoplastic cell, said method comprising administering to said neoplastic cell an effective amount of a pharmaceutical association, combination or composition as defined herein, wherein administering said pharmaceutical association, combination or composition activates the growth factor receptor present on the surface of the neoplastic cell.

[0967] In one aspect, the present disclosure provides methods of delivering a pharmaceutical composition in-vitro, ex-vivo or in-vivo to a neoplastic cell, comprising the contacting of said neoplastic cell with said pharmaceutical composition, and wherein said pharmaceutical composition comprises a GFR-binding compound and a bioactive carrier as defined herein.

[0968] In one aspect, the present disclosure provides methods of administering a pharmaceutical association, combination or composition comprising a GFR-binding compound and a bioactive carrier to a subject comprising the contacting of at least one body part of said subject with said pharmaceutical association, combination or composition.

[0969] Protected from a disease, condition, disorder or pathology refers to the treatment of the underlying cause of the disease, condition, disorder or pathology as well as reducing the symptoms of the disease, condition, disorder or pathology; and/or reducing the occurrence of the disease, condition, disorder or pathology; and/or reducing the severity of the disease, condition, disorder or pathology. Protecting a patient can refer to the ability of a therapeutic composition of the present invention, when administered to a patient, to prevent a disease, condition, disorder or pathology from occurring and/or to cure or to alleviate disease, condition, disorder or pathology symptoms, signs or causes. As such, to protect a patient from a disease, condition, disorder or pathology includes both preventing disease, condition, disorder or pathology occurrence (prophylactic treatment) and treating a patient that has a disease, condition, disorder or pathology or that is experiencing initial symptoms or later stage symptoms of a disease, condition, disorder or pathology (therapeutic treatment).

[0970] Treating: As used herein, unless indicated otherwise or contradictory in context, the term “treating” or “treatment” refers to partially or completely alleviating, ameliorating, improving, relieving, delaying onset of, inhibiting progression of, reducing severity of, and/or reducing incidence of one or more symptoms or features of a particular disease, disorder, pathology and/or condition. For example, in certain embodiments, “treating” or “treatment of” cancer may refer to inhibiting survival, growth, and/or spread of a tumor. Treatment may be administered to a subject who does not exhibit signs of a disease, disorder, and/or condition and/or to a subject who exhibits only early signs of a disease, disorder, pathology and/or condition for the purpose of decreasing the risk of developing pathology associated with the disease, disorder, and/or condition.

[0971] As used herein, “treating a neoplastic cell” is used interchangeably with the expression “converting a neoplastic cell into a non-neoplastic cell”.

[0972] Preventing: As used herein, unless indicated otherwise or contradictory in context, the term “preventing” refers to partially or completely delaying onset of an infection, disease, disorder and/or condition; partially or completely delaying onset of one or more symptoms, features, or clinical manifestations of a particular infection, disease, disorder, and/or condition; partially or completely delaying onset of one or more symptoms, features, or manifestations of a particular infection, disease, disorder, and/or condition; partially or completely delaying progression from an infection, a particular disease, disorder and/or condition; and/or decreasing the risk of developing pathology associated with the infection, the disease, disorder, and/or condition.

[0973] Substantially diminished, reduced or inhibited: As used herein, unless indicated otherwise or contradictory in context, the term “substantially diminished” or “substantially inhibited” as it relates to cellular activity and/or function, protein expression or complexes formation, refers to a diminution or reduction in activity or function, in comparison with the activity and/or function of a normal or healthy cell (e.g. a non-neoplastic cell), of 1%, 2%, 3%, 4%, 5%, 6%, 7%, 8%, 9%, 10%, 11%, 12%, 13%, 14%, 15%, 16%, 17%, 18%, 19%, 20%, 21%, 22%, 23%, 24%, 25%, 26%, 27%, 28%, 29%, 30%, 31%, 32%, 33%, 34%, 35%, 36%, 37%, 38%, 39%, 40%, 41%, 42%, 43%, 44%, 45%, 46%, 47%, 48%, 49%, 50%, 51%, 52%, 53%, 54%, 55%, 56%, 57%, 58%, 59%, 60%, 61%, 62%, 63%, 64%, 65%, 66%, 67%, 68%, 69%, 70%, 71%, 72%, 73%, 74%, 75%, 76%, 77%, 78%, 79%, 80%, 81%, 82%, 83%, 84%, 85%, 86%, 87%, 88%, 89%, 90%, 91%, 92%, 93%, 94%, 95%, 96%, 97%, 98%, or 99%, in particular of 50% to 99%, 55% to 99%, 60% to 99%, 65% to 99%, 70% to 99%, 75% to 99%, 80% to 99%, 85% to 99% or 90% to 99%. The same applies conversely to the term “substantially increased”.

[0974] Disease: As used herein, unless indicated otherwise or contradictory in context, the term “disease” refers to any deviation from the normal health of a patient and includes a state when disease symptoms are present, as well as conditions in which a deviation has occurred, but symptoms are not yet manifested. A defective, ill-functioning, malfunctioning, dysfunctioning, and/or deleterious cell, such as e.g. a neoplastic cell, may be a cause of a disease. The same applies to “condition”, “disorder” and “pathology”.

[0975] Neoplasm: As used herein, unless indicated otherwise or contradictory in context, the term “neoplasm” (sometimes also referred to as tumor or tumour) refers to an abnormal growth of tissue. This abnormal growth usually but not always forms a mass. The World Health Organization classifies neoplasms into four main groups: benign neoplasms, in situ neoplasms, malignant neoplasms, and neoplasms of uncertain or unknown behavior. A malignant neoplasm is a cancer.

[0976] Neoplastic cell: As used herein, unless indicated otherwise or contradictory in context, the term “neoplastic cell” refers to a cell with abnormal proliferation, generally due the presence of a defective cell cycle, as well as cells which may become neoplastic such as cancer stem cell for which a definition is given in “Refining the role for adult stem cells as cancer cells of origin”, White A C, Lowry W E, Trends Cell Biol. 2014 Sep. 18. pii: S0962-8924(14)00145-7, and “review article Stem cells, cancer, and cancer stem cells”, Tannishtha Reya et al., Nature 414, 105-111 (1 Nov. 2001), which are incorporated herein by reference in their entirety.

[0977] Neoplastic disease: As used herein, unless indicated otherwise or contradictory in context, the term “neoplastic disease”, used interchangeably with “neoplastic conditions”, “neoplastic disorder” and “neoplastic pathology”, refers to a disease associated with an abnormal growth of tissue, generally due to the presence of a neoplastic cell.

[0978] Circulating: As used herein, unless indicated otherwise or contradictory in context, the term “circulating”, when used in relation to a neoplastic cell, refers to a neoplastic cell that has detached itself from a primary tumor site and migrates to a different location in the body to become a metastatic tumor.

[0979] Cancers: As used herein, unless indicated otherwise or contradictory in context, the term “cancer” refers to a malign form of neoplasm which includes sarcomas, carcinomas, lymphomas, leukemias (or leukaemias), teratomas, mesotheliomas, myelomas and germinomas. Cancers include, but are not limited to, Acute lymphoblastic leukaemia (ALL), Acute myeloid leukaemia, Adrenocortical carcinoma, AIDS-related cancers, AIDS-related lymphoma, Anal cancer, Appendix cancer, Astrocytoma, childhood cerebellar or cerebral, Basal-cell carcinoma, Bile duct cancer, Bladder cancer, Bone tumor, osteosarcoma/malignant fibrous histiocytoma, Brainstem glioma, Brain cancer, Breast cancer, Bronchial adenomas/carcinoids, Burkitt's lymphoma, Carcinoid tumor, Central nervous system lymphoma, Cerebellar astrocytoma, Cerebral astrocytoma/malignant glioma, Cervical cancer, Childhood cancers, Chronic bronchitis, Chronic lymphocytic leukaemia, Chronic myelogenous leukaemia, Chronic myeloproliferative disorders, Chronic obstructive pulmonary disease (COPD), Colon cancer, Cutaneous T-cell lymphoma, Desmoplastic small round cell tumor, Emphysema, Endometrial cancer, Ependymoma, Esophageal cancer, Ewing's sarcoma in the Ewing family of tumors, Extracranial germ cell tumor, Extragonadal germ cell tumor, Extrahepatic bile duct cancer, Eye cancer, Gallbladder cancer, Gastric (stomach) cancer, Gastrointestinal carcinoid tumor, Gastrointestinal stromal tumor (GIST), Germ cell tumor: extracranial, extragonadal, or ovarian, Gestational trophoblastic tumor, Glioma of the brain stem, Glioma, Gastric carcinoid, Hairy cell leukemia, Head and neck cancer, Heart cancer, Hepatocellular (liver) cancer, Hodgkin lymphoma, Hypopharyngeal cancer, Hypothalamic and visual pathway glioma, childhood, Intraocular melanoma, Islet cell carcinoma (endocrine pancreas), Kaposi sarcoma, Kidney cancer (renal cell cancer), Laryngeal cancer, Leukemias, acute lymphoblastic leukemia, acute myeloid leukemia, chronic lymphocytic leukemia, chronic myelogenous leukemia, hairy cell Leukemia, Lip and oral cavity cancer, Liposarcoma, Liver cancer, Lung cancer, AIDS-related lymphoma, Burkitt lymphoma, cutaneous T-Cell lymphoma, Hodgkin lymphoma, Non-Hodgkin lymphoma, primary central nervous system lymphoma, Macroglobulinemia, Male breast cancer, Malignant fibrous histiocytoma of bone/osteosarcoma, Medulloblastoma, intraocular (eye) Melanoma, Merkel cell cancer, Mesothelioma, Metastatic squamous neck cancer with occult primary, Mouth cancer, Multiple endocrine neoplasia syndrome, Multiple myeloma/plasma cell neoplasm, Mycosis fungoides, Myelodysplastic syndromes, Myelodysplastic/myeloproliferative diseases, multiple Myeloma, Myeloproliferative disorders, Nasal cavity and paranasal sinus cancer, Nasopharyngeal carcinoma, Neuroblastoma, Oral cancer, Oropharyngeal cancer, Osteosarcoma/malignant fibrous histiocytoma of bone, Ovarian cancer, Ovarian epithelial cancer, Ovarian germ cell tumor, Ovarian low malignant potential tumor, Pancreatic cancer, Pancreatic cancer, islet cell Paranasal sinus and nasal cavity cancer, Parathyroid cancer, Penile cancer, Pharyngeal cancer, Pheochromocytoma, Pineal astrocytoma, Pineal germinoma, Pineoblastoma and supratentorial primitive neuroectodermal tumors, Pituitary adenoma, Plasma cell neoplasia/Multiple myeloma, Pleuropulmonary blastoma, Primary central nervous system lymphoma, Prostate cancer, Rectal cancer, Renal cell carcinoma (kidney cancer), Renal pelvis and ureter, transitional cell cancer, Retinoblastoma, Rhabdomyosarcoma, Salivary gland cancer, Ewing family of tumors Sarcoma, Kaposi Sarcoma, soft tissue Sarcoma, uterine Sarcoma, Sézary syndrome, Skin cancer (non-melanoma), Skin cancer (melanoma), Merkel cell Skin carcinoma, Small intestine cancer, Soft tissue sarcoma, metastatic squamous neck cancer with occult primary, Stomach cancer, Supratentorial primitive neuroectodermal tumor, cutaneous T-Cell lymphoma, Testicular cancer, Throat cancer, Thymoma and thymic carcinoma, Thyroid cancer, Transitional cell cancer of the renal pelvis and ureter, Trophoblastic tumor, transitional cell cancer, Urethral cancer, Uterine cancer, Uterine sarcoma, Vaginal cancer, Visual pathway and hypothalamic glioma, Vulvar cancer, Waldenström macroglobulinemia, and Wilms tumor (kidney cancer). In certain embodiments, cancers that may be treated using the recoding therapy disclosed herein are selected from the group consisting of sarcomas such as Osteosarcoma, Osteoma, Chondrosarcoma, Chondroma, Leiomyosarcoma, Leiomyoma, Rhabdomyosarcoma, Rhabdomyoma, Mesothelioma, Fibrosarcoma, Fibroma, Malignant Histiocytoma, Hisitocytoma, Angiosarcoma, Hemangiosarcoma, Hemangioma, Hemangiopericytoma, Lymphangiosarcoma, Lymphangioma, Liposarcoma, Lipid Cell Tumor, Lipoma, Myxosarcoma, Chordoma, Cystosarcoma Phylloides, Fibroadenoma, Seminoma, Dysgerminoma, Sertoli-Leydig Cell Tumor, Arrhenoblastoma, Granulose-Theca Cell Tumor, Hilar Cell Tumor, Prostate Cancer, Prostatic Hypertrophy, Wilms Tumor, Melanoma, Nevus, Neurofibrosarcoma, Glioma, Anaplastic Glioma, Glioblastoma, Neuroblastoma, Medulloblastoma, Ganglioneuroma, Malignant meningioma, Meningioma, Malignant Schwannoma, Schwannoma, Neurilemmoma, Neurofibroma and Mesenchymous Tumor; Carcinomas such as Squamous Cell Carcinoma, Merkel Cell Neoplasm, Epidermoid Carcinoma, malignant Skin Adnexal Tumor, Adenocarcinoma, Hepatocellular Carcinoma, Renal Cell Carcinoma, Choriocarcinoma, Hypernephroma, Cholangiocarcinoma, Transitional Cell Carcinoma, Seminoma, Embryonal Cell Carcinoma, Papilloma, Seborrheic Keratosis, Skin Adnexal Tumors, Hepatoma, Adenoma, Hepatic Adenoma, Renal Tubular Adenoma, Bile Duct Adenoma, Transitional Cell Papilloma, Hydatidiform Mole, Parathyroid Carcinoma, Parathyroid Adenoma, Medullary Carcinoma of Thyroid, C Cell Hyperplasia, Malignant Pheochromocytoma, Pheochromocytoma, Islet Cell Carcinoma, Islet Cell Adenoma, Insulinoma, Gastrinoma, Malignant Carcinoid, Carcinoid, Malignant Paraganglioma, Chemodectoma and Paraganglioma; Myelomas; Leukemias such as Myelogenous Leukemia, Lymphatic Leukemia, Policythemia, Aleukemic Leukemia, Preleukemia and Myeloproliferative Disorders; Lymphoma such as Myeloma, Hodgkin Lymphoma, Non-Hodgkin Lymphoma, Plasmacytoma and Plasmacytosis; Adenosquamous Carcinoma, Mesodermal Tumor, Carcinosarcoma and Teratocarcinoma.

[0980] Symptoms of neoplastic diseases: In one example, the present invention treats or alleviates at least one symptom selected from Angina, Bradypnea, Breathing difficulties, Gradual vision change in both eyes, Gradual vision changes in one eye, Head symptoms, Heartburn, Muscle symptoms, Nerve symptoms, Perforated gastric ulcer, Perforated ulcer, Respirations, shallow, Sexual symptoms, Weight loss, Oesophagus symptoms, Weight symptoms, Anaemia, Bad breath, Breath odors, Burning feet, Burning Legs, Cleft lip with or without cleft palate in children, Communication symptoms, Diarrhea, Dyspepsia, Easily fatigued, Enlarged liver, Face symptoms, Foot pain, Gastritis, Gastrooesophageal reflux in pregnancy, Glossitis, Hairy Tongue, Hyperlipidaemia, Hypertriglyceridemia, Impotence, Lack of energy, Lag in breathing, Male infertility, Meniere's disease, Movement symptoms, Musculoskeletal symptoms, Night sweats in children, Non-respiratory causes of shallow respiration, Raised ambulatory 24 hr pH monitoring, Rapid heartbeat, Respiratory lag, Sleep symptoms, Sleeplessness, Speech symptoms, Sweat symptoms, Trauma-related symptoms, Voice symptoms, Vomiting, White tongue, Abdominal symptoms, Abnormal blood test symptoms, Acute reflux-like regurgitation in pregnancy, Acute reflux-like symptoms in pregnancy, Acute reflux-like vomiting in pregnancy, Acute stomach ulcer-like symptoms in pregnancy, Birth symptoms, Blanching in the fingers, Bleeding symptoms, Blood symptoms, Blood vessel damage, Chronic pain in multiple muscles, Digestive symptoms, Elevated blood pressure in pregnancy, Episodic arterial vasospasm, Female infertility, Female reproductive symptoms, Fertility symptoms, Heart enlargement, Hiatus hernia, Hiatus hernia related to chronic digestive disorders, High blood pressure, Hypertension-like symptoms in pregnancy, Impaired myocardial contractility, Increased Systolic pressure, Infection, Infertility, Intermittent claudication, Intermittent claudication of both lower limbs, Intermittent claudication of one lower limb, Intermittent pain of the lower limb, Lower abdominal symptoms, Lower blood pressure in the legs than in the arms, Mouth symptoms, Mycocardial ischemia, Noncompliance, Occlusion of renal arteries, Pain, Peripheral arterial trauma, Poor appetite, Poor wound healing, Pregnancy symptoms, Pulsatile Abdominal swelling, Red blood cell symptoms, Reflux-like symptoms, Respiratory symptoms, Sensory symptoms, Severe chronic pain in multiple bones, Sore throat, Sweating, Throat symptoms, Urinary incontinence, Venous insufficiency, Women's health symptoms, Birth defects, Eating symptoms, 1 litre of sweat per hour, Aberrant behaviour in pregnancy, Abnormal eye movements, Abnormal Liver Function Tests in Pregnancy, Abnormal thinking in pregnancy, Absenteeism, Accentuated fall in systolic pressure, Acidosis, Action tremor, Acute epilepsy-like symptoms, Acute forgetfulness in pregnancy, Acute hemorrhagic pancreatitis, Acute intermittent forgetfulness in pregnancy, Acute onset of daytime sleepiness, Acute onset of daytime sleepiness in adults, Acute onset of daytime sleepiness in the elderly, Acute pancreatitis, Addiction symptoms, Aggression, Alcohol abuse, Alcohol breath odor, Alcohol use, Altered bladder habits in pregnancy, Altered mental state, Altered vital signs, Anxiety disorder in pregnancy, Anxiety in pregnancy, Apprehension in pregnancy, Arrhythmia, Arrhythmias, Atrial fibrillation, Balance symptoms, Behavior problems at school, Behavior problems at work, Behavior problems in adults, Behavior problems in children, Behavior problems in teens, Behavioral symptoms, Behaviour changes in pregnancy, Blackouts, Cerebellar ataxia, Chronic Diarrhea, Chronic orthostatic hypotension, Cleft palate in children, Clumsiness, CNS depression in children, Cognitive impairment, Coma, Confusion, Confusion in children, Coordination problems, De-personalization, Decreased level of consciousness, Deep stupor, Dehydration, Delayed ejaculation, Delirium, Delusions, Dementia, Depressed mental status, Depressive symptoms, Diabetic retinopathy, Diaphoresis of the feet, Diaphoresis of the forehead, Diaphoresis of the palms, Diaphoresis of the soles, Difficulty concentrating in adults, Disoriented state, Diuresis, Dramatic fall in blood pressure, Drowsiness, Drug abuse, Drug withdrawal causing new-onset seizures, Drugs, Drugs causing diarrhea, Drugs causing macrocytosis, Drugs causing persistent hypoglycemia, Drugs causing persistent hypoglycemia in adolescents, Drugs causing persistent hypoglycemia in children, Drugs causing persistent hypoglycemia in infants, Dysphagia due to esophagitis, Emotional symptoms, Energy symptoms, Epilepsy-like symptoms, Episodic Diaphoresis, Episodic Diaphoresis as in case of diabetes mellitus, Euphoria, Excessive diaphoresis, Eye symptoms, Fainting, Fainting episodes similar as in pulmonary hypertension, Falls, Fatigue, Feeling the heartbeat, Flushing, Forgetfulness, Forgetfulness in pregnancy, Frequency of urination in pregnancy, Frequent urination, Frequent urination in pregnancy, Generalised diaphoresis, Generalised diaphoresis with heat loss via evaporation, Hallucinations, Headache, Heart arrhythmia, Heart arrhythmias, Heart flutters, High ALP, High ALT, High AST, Hyperosmolarity, Hypoperfusion state, Hypothermia, Hypothermic attack, Imbalance, Impaired circulation, Inadequate intravascular pressure, Inattention, Inattention symptoms, Increased bilirubin, Increased GGT, Increased prothrombin time, Increased sweating, Intercourse symptoms, Intermittent diaphoresis, Intermittent epilepsy-like symptoms, Intermittent seizures in early childhood, Involuntary tonic movements, Irregular heartbeat, Irritability, Jaundice in pregnancy, Level of consciousness symptoms, Liver tenderness in pregnancy, Low albumin, Low blood platelet level in pregnancy, Low blood pressure, Low blood sugar, Low temperature, Major depression in pregnancy, Male impotence, Memory disturbances, Memory Disturbances in pregnancy, Memory loss in pregnancy, Memory symptoms, Memory symptoms in pregnancy, Mental changes in pregnancy, Mental depression, Mental depression in pregnancy, Mental problems, Mental problems in pregnancy, Mild depression in pregnancy, Mild depression-like symptoms in pregnancy, Mild personality changes, Moderate depression in pregnancy, Mood swings, Muscle pain, Muscle weakness, Myoclonus, Nerve damage, Nervousness, Nervousness in pregnancy, Neuromuscular irritability, Neuromuscular irritability of lower limbs, Neuropathy, Night time urination in pregnancy, Night urination in pregnancy, Nocturia in pregnancy, Numbness in Both Feet, Numbness in one foot, Nystagmus, Ocular myokymia, Orthostatic hypotension, Ototoxic medications, Palpitations, Pancreatitis, Paresthesias, Penile Burning Sensation, Persistent painful erection, Personality change, Personality symptoms, Phobia, Progressive mental deterioration, Prolonged exposure to cold, Psychiatric symptom, Pulse irregularity in pregnancy, Red face, Reduced immune response, Reduced intravascular pressure, Reduced sperm count, Retinopathy, School problems, Seizures, Seizures in infants and early childhood, Self-esteem symptoms, Severe epilepsy-like symptoms, Sexual dysfunction in pregnancy, Short-term memory loss, Signs of circulatory collapse, Signs of circulatory collapse as seen in intestinal hemorrhage, Sleeping problems, Slurred speech, Social problems, Society problems, Sole numbness, Standing symptoms, Stupor, Subfertility, Substance abuse causing school underachievement and academic failure, Substances of abuse causing delirium, Sudden onset of confusion in children, Syncopal episode, Thigh Burning Sensation, Thrombocytopenia, Thrombocytopenia in pregnancy, Tingling in Both Feet, Tingling in both hands, Tingling in one foot, Tingling in one hand, Tonic-clonic seizure, Toxins causing vomiting, Tremor, Unusual body odor in children, Urinary burning, Urinary urgency, Urine retention, Vascular collapse, Vertigo, Violent behaviour, Walking symptoms, Weight loss in pregnancy, Abnormal uterine bleeding, Abortion, Abruptio Placentae in Pregnancy, Abscessed teeth, Acid Reflux in pregnancy, Acquired mental retardation, Acute acid reflux into mouth during pregnancy, Acute attack of asthma, Acute cerebral infarct, Acute seasonal asthma-like symptoms, Aphthous Ulcer, Arm burning sensation, Arm coldness, Arm infection, Arm inflammation, Arm numbness, Arm paresthesia, Arm redness, Arm sensitive, Arm spasm, Arm swelling, Atelectasis, Biceps burning sensation, Biceps cold, Biceps infection, Biceps inflammation, Biceps numb, Biceps redness, Biceps spasm, Biceps swelling, Biceps tingling, Bilateral cleft lip and palate, Bilateral complete cleft lip, Bilateral stroke, Black hairy tongue, Bladder symptoms, Blood clots, Blood lead concentration, Blood pressure symptoms, Blood vessel symptoms, Blue lips, Bone changes, Breath sound symptoms, Breath symptoms, Bronchial cancer, Bronchitis, Brown nails, Cancer-related symptoms, Cardiovascular symptoms, Cervix symptoms, Chronic bronchitis, Chronic cough, Chronic cough in adolescents, Circulation symptoms, Claudication, Cluster headache, Constant leg pain, Coracobrachialis infection, Coracobrachialis redness, Coracobrachialis swelling, Cough, Cramping leg pain, Cramping pain in both legs, Dark spots on teeth, Darkened tongue, Death, Death-related symptoms, Decreased salivary function, Digit burning sensation, Digit cold, Digit infection, Digit inflammation, Digit numb, Digit redness, Digit sensitive, Digit spasm, Digit swelling, Digit tingling, Disc herniation, Disc prolapse, Discolored teeth in children, Dry cough, Dry Gangrene, Dry mucous membrane as in case of Sjogren's syndrome, Dry skin, Electrocardiogram changes, Eructation, Exercise symptoms, Female genital symptoms, Female sexual symptoms, Femur burning sensation, Femur numb, Femur tingling, Fetal symptoms, Fibula burning sensation, Fibula numb, Fibula tingling, Finger burning sensation, Finger pulp burning sensation, Fingernail burning sensation, Fingers burning sensation, Fingers cold, Fingers infection, Fingers inflammation, Fingers numb, Fingers redness, Fingers sensitive, Fingers spasm, Fingers swelling, Fingers tingling, Forearm burning sensation, Forearm cold, Forearm infection, Forearm inflammation, Forearm numb, Forearm redness, Forearm sensitive, Forearm spasm, Forearm swelling, Forearm tingling, Foul mouth odour, Genital symptoms, Growth symptoms, Heart damage, Heart disease, Heart rhythm symptoms, Heart symptoms, Heartburn after eating in pregnancy, Heartburn after exercise in pregnancy, Heartburn in pregnancy, Heartburn pain resistant to treatment in pregnancy, Heartburn that worsens if lying down after eating in pregnancy, Heartburn unrelated to eating in pregnancy, Heartburn with acid reflux in pregnancy, Heartburn without reflux in pregnancy, Herniated disk, Hiccups, High lipoprotein level, Hoarse, Humerus burning sensation, Humerus numb, Humerus tingling, Hypoxia in pregnancy, Increased capillary refill time, Increased secretions in the lung, Indigestion in pregnancy, Infant symptoms, Inflammatory symptoms, Irregular rhythm, Kidney symptoms, Knee joint burning sensation, Knee joint cold, Knee joint numb, Knee joint sensitive, Knee joint tingling, Kneecap burning sensation, Kneecap cold, and any combinations thereof.

[0981] In one aspect, the present disclosure provides methods to activate, promote, support, improve, or increase the activity of a growth factor receptor present in, on the surface of a neoplastic cell such that the neoplastic cell in converted into a non-neoplastic cell and/or a subject carrying said cell is protected from a neoplastic disease, said methods optionally comprising the administration of a pharmaceutical association as defined herein.

[0982] In one aspect, the present disclosure provides methods to activate, promote, support, improve, or increase the tumor suppressor activity of proteins p53 and/or pRb (retinoblastoma protein) in a neoplastic cell such that the neoplastic cell in converted into a non-neoplastic cell and/or a subject carrying said cell is protected from a neoplastic disease, said methods comprising the administration of a pharmaceutical association as defined herein.

[0983] In one aspect, the present disclosure provides methods to convert a neoplastic cell (e.g. a cancer cell) into a non-neoplastic cell (e.g. a non-cancerous cell) and/or to protect a subject carrying this cell from a neoplastic disease, disorder, condition, pathology or at least one symptom thereof, which involves dampening or inhibiting cell division and/or regulating, re-establishing or restoring a cell adhesion checkpoint and/or inducing differentiation of said neoplastic cell.

### XIV. Diagnostic Methods

[0984] In one aspect, the present disclosure provides methods of identifying, diagnosing, and optionally classifying subjects on these bases, which may include clinical diagnosis, biomarker levels, and other methods known in the art.

[0985] In one aspect, the present disclosure provides a pharmaceutical association or composition as defined herein for use in a diagnostic method of a neoplastic disease (e.g. a cancer). In one example, such a diagnostic method comprises the detection of a cancer using a method described in US patent application No. 2002/0159986 A1, which is incorporated herein by reference in its entirety.

[0986] In one aspect, the present disclosure provides a diagnostic method for diagnosing of a neoplastic disease or condition comprising the provision of a pharmaceutical association or composition as defined herein, and the contacting or administration of said pharmaceutical association or composition with a body part of a subject to be diagnosed.

[0987] A method for the diagnosis of cancer in a patient, comprising obtaining a biological sample from a patient and apply fluorescent and/or radiolabeled GFR binding compounds, wherein high localisation of these compounds indicates cancer in the patient.

[0988] In one aspect, the present disclosure provides methods of determining the effectiveness of a pharmaceutical association, combination or composition as defined herein for converting a neoplastic cell into a non-neoplastic cell and/or for treating a neoplastic disease or at least one symptom thereof, comprising the administration of said pharmaceutical association to a cell; the measurement of the expression of specific differentiation and/or cancerous markers as defined herein in the cell; the comparison of the expression of said specific differentiation and/or cancerous markers in the cell to the expression of said specific differentiation and/or cancerous markers in a cell treated with a reference (or control) pharmaceutical association, compound or solvent; and determining the effectiveness of the pharmaceutical association or composition relative to the reference pharmaceutical association or compound.

### XV. Screening Methods

[0989] In one aspect, the present disclosure provides a screening method for selecting a GFR-binding compound having the ability, after being associated or combined with a bioactive carrier as defined herein (thus forming a pharmaceutical association or combination as defined herein), to convert or recode a neoplastic cell into a non-neoplastic cell.

[0990] In one aspect, the present disclosure provides a screening method for selecting a peptide or a peptidomimetic having the ability, after being associated or combined with a bioactive carrier as defined herein (thus forming a pharmaceutical association or combination as defined herein), to convert or recode a neoplastic cell into a non-neoplastic cell.

[0991] In one aspect, the present disclosure provides a screening method for selecting a peptide or peptidomimetic having the ability, after being associated or combined with a bioactive carrier as defined herein (thus forming a pharmaceutical association or combination as defined herein), to convert or recode a neoplastic cell into a non-neoplastic cell, the method comprising the steps of (a) providing a molecular model of the 3D structure coordinates of PEPREF as defined herein and (b) identifying a candidate analog having a RMSD value of 2.45 Å or less, in particular of 2 Å or less, and more particularly of 1.79 Å or less. In one particular example, step (b) is performed using the method of RMSD calculation as already defined herein

[0992] In certain embodiments, the method can be performed using a computer (i.e., in silico). In some embodiments, the method can include providing the three-dimensional models of a plurality of peptides or peptidomimetics (i.e., a library or database of peptides or peptidomimetics) and screening each compound individually. Thus, in one aspect, the method of screening peptides or peptidomimetics generally includes computationally evaluating the potential of a selected peptide(s) or peptidomimetic(s) to structurally match with the computational model of the three-dimensional structure of PEPREF. For example, this method can include the steps of (a) employing a computational approach to perform a fitting operation between the selected peptide(s) or peptidomimetic(s) and the three-dimensional structure of PEPREF; and (b) analysing the results of the fitting operation to quantify the three-dimensional structural similarities between the peptide(s) or peptidomimetic(s) and PEPREF using the RMSD procedure as defined herein.

[0993] In one aspect, the present disclosure provides a method of producing a peptide or peptidomimetic having the ability, after being associated or combined with a bioactive carrier as defined herein (thus forming a pharmaceutical association or combination as defined herein), to convert or recode a neoplastic cell into a non-neoplastic cell, the method comprising the steps of (a) providing a molecular model of the following 3D structure coordinates of PEPREF; b) identifying a candidate analog having a RMSD as defined herein of 2.45 Å or less (in particular 2, more particularly 1.79); and (c) producing the candidate analog identified in step (b). In one particular example, said method further comprising the step of determining whether the compound produced in step (c) has a neoplastic cell recoding activity. In one particular example, steps (a) and (b) are performed by means of an electronic processor. In certain embodiments, step (a) comprises storing a representation of the atomic co-ordinates of PEPREF in a computer memory.

[0994] In one aspect, the present disclosure provides a method of producing a peptide or peptidomimetic having the ability, after being associated or combined with a bioactive carrier as defined herein (thus forming a pharmaceutical association or combination as defined herein), to convert or recode a neoplastic cell into a non-neoplastic cell, the method comprising the steps of: (a) providing in a computer memory atomic X-ray crystallographic co-ordinates of PEPREF; (b) generating with a processor a molecular model having a three-dimensional shape of PEPREF; (c) identifying a candidate analog having a RMSD of 2.45 Å or less (in particular 2, more particularly 1.79); (d) producing the candidate analog identified in step (c); and (e) determining whether the candidate analog produced in step (d), once associated or combined with a bioactive carrier as defined herein (thus forming a pharmaceutical association or combination as defined herein), has the ability to convert or recode a neoplastic cell into a non-neoplastic cell. In one particular example, said method comprises the additional step of producing the peptide or peptidomimetic in a commercially useful quantity.

[0995] In one aspect, the present disclosure provides a computer system comprising: (a) a memory comprising atomic X-ray crystallographic coordinates of PEPREF; and (b) a processor in electrical communication with the memory; wherein the processor generates a molecular model having a three dimensional shape representative of PEPREF. In one particular example, said coordinates are stored on a computer readable diskette.

### XVI. Kits

[0996] The present disclosure provides a variety of kits for conveniently and/or effectively carrying out methods and uses of the present invention. Typically, kits will comprise sufficient amounts and/or numbers of components to allow a user to perform multiple treatments of a subject(s) and/or to perform multiple experiments.

[0997] In one aspect, the present disclosure provides kits for pharmaceutical association production, comprising at least one GFR-binding compound as defined herein, at least one bioactive carrier as defined herein, both provided in an amount effective to produce a pharmaceutical association to convert a neoplastic cell into a non-neoplastic cell and/or treat, prevent or diagnose a neoplastic disease when administered in-vitro, ex-vivo or in-vivo to a neoplastic cell or a subject carrying such a neoplastic cell, and packaging and instructions.

[0998] In one aspect, the present disclosure provides kits for pharmaceutical composition production, comprising a GFR-binding compound as defined herein, a bioactive carrier as defined herein, and a pharmaceutically acceptable excipient, carrier or vehicle, each of them provided in an amount effective to produce a pharmaceutical composition to convert a neoplastic cell into a non-neoplastic cell and/or treat or prevent a neoplastic disease when administered in-vitro, ex-vivo or in-vivo to a neoplastic cell or a subject carrying such a neoplastic cell, and packaging and instructions.

[0999] Suitable as solvents for use in kits of the invention include physiologically acceptable solvents, PBS, filtered and deionised water such as Milli-Q® water, alpha-MEM, DMEM and/or IMDM. All physiologically acceptable solvents suitable for implementing embodiments of the present invention are preferably deoxygenated before use.

[1000] In one example, said kit further comprises an administration device. In one example, said administration device is a dispensing device such as a syringe.

[1001] In one example, said kit comprises a first container containing a (modified) GFR-binding compound as defined herein and a second container containing a bioactive carrier such as a biomaterial.

[1002] In one particular example, said kits of the invention may suitably be provided in the form of a sterile packaging.

[1003] For example, in certain embodiments, said kits of the invention comprises more than 2, between 2 and 25, between 2 and 15, or between 2 and 10 of (modified) GFR-binding compound as defined herein, and more than 2, between 2 and 25, between 2 and 15, or between 2 and 10 (modified) GFR-binding compound as defined herein.

[1004] In one example, each (modified) GFR-binding compound and each bioactive carrier is conditioned in distinct and separated compartments, in lyophilised form, in solution or in suspension in a pharmaceutically dermatologically, prophylactically, diagnostically, imaging or cosmetically acceptable excipient, carrier or vehicle.

[1005] In one aspect, the invention discloses kit-of-parts comprising a bioactive carrier and a (modified) GFR-binding compound both as defined herein for uses and methods as defined herein.

### XVII. Sequence Listing

[1006] Examples of (modified) GFR-binding compounds as defined herein are listed in the appended sequence listing which forms an integral part of the present application.

[1007] Examples of (modified) cyclic GFR-binding compounds as defined herein are listed in the appended sequence listing which forms an integral part of the present application. (Modified) cyclic GFR-binding compounds of the present disclosure may be represented in non-cyclic, linear, form solely for the purpose of ease of representation but nevertheless remains cyclic compounds wherein the first and the last functional group (e.g. an amino acid) of the linearly represented compound are covalently connected to each other thereby forming a cyclic structure.

[1008] Pharmaceutical associations, combinations and compositions as defined in the present disclosure, has been found to lead to multiple and distinct advantages in terms of neoplastic diseases treatment.

[1009] As supported by the examples of the present application, pharmaceutical associations, combinations and compositions as defined in the present disclosure provide for a new area of treatment of neoplastic diseases by extracellularly converting or recoding neoplastic cells into functional and healthy cells. The therapy of the invention containing pharmaceutical associations, combinations or compositions as defined herein display advantages over therapies that do not contain it, such as any one of, and preferably a plurality of:
[1010] Enhanced and/or more practical and/or more efficient and/or more cost-effective and/or more adapted to the end-user needs;
[1011] Converting or recoding a neoplastic cell to induce and/or promote and/or improve self-healing and/or self-recovery thereof, particularly in a shorter period of time;
[1012] Converting a neoplastic cell into a non-neoplastic cell and/or protecting a subject from a neoplastic disease, disorder, condition, pathology, such as cancer, or symptoms thereof using non-mutagenic means;
[1013] Converting a neoplastic cell into a non-neoplastic cell and/or protecting a subject from a neoplastic disease, disorder, condition, pathology, such as cancer, or symptoms thereof using extracellular means;
[1014] Restoring a neoplastic cell ability to undergo differentiation, particularly in a shorter period of time;
[1015] Converting and/or recoding a circulating or non-circulating neoplastic cell such as a metastatic or non-metastatic cancer cell, into a non-neoplastic cell, particularly in a shorter period of time;
[1016] Protecting a subject from a neoplastic disease, disorder, condition or pathology such as cancer, and/or any symptoms thereof, particularly in a shorter period of time;
[1017] Providing and/or producing a physiologically functional and/or healthy osteoblast, osteocyte, chondroblast, chondrocyte, neuroblast, neurocyte, Sertoli cells, Leydig cell, Germ cell, Myoblast, Myocyte, keratinocyte, endothelial cells, angioblast, fibroblast, fibrocyte or podocyte from a neoplastic cell, particularly within a shorter period of time;
[1018] Re-establishing, reactivating or restoring the cell adhesion checkpoint of a neoplastic cell;
[1019] Treating a neoplastic cell without substantially inducing cell death;
[1020] Inducing quiescence of a neoplastic cell;
[1021] Dampening, reducing or suppressing cell division/proliferation of a neoplastic cell;
[1022] Activating and/or promoting and/or up-regulating anti-mitogen activity and/or tumor suppressor pathways and/or anti-oncogenic activity in a neoplastic cell;
[1023] Adapted to the treatment of any neoplastic cell;
[1024] Safer for the patient being treated as providing less or no harmful side-effects;
[1025] Offers the possibility for local treatments of neoplastic diseases;
[1026] Relies mainly or only on the activation of physiological cell mechanisms which increases the general safety of the herein defined therapy.

[1027] For example, in certain embodiments, pharmaceutical association or combinations, or compositions according to the present disclosure in which PEP1 is a peptide selected from the group consisting of SAIS, NAIS, SATS and SPIS, have been found to lead to unexpectedly fast conversion of a cancerous cell into a healthy and functional cell of the bone lineage.

[1028] For example, in certain embodiments, pharmaceutical association or combinations, or compositions according to the present disclosure in which PEP1 is a peptide selected from the group consisting of SAIS, NAIS, SPIS, EPLP, and EPLT, have been found to lead to unexpectedly fast conversion of a cancerous cell into a healthy and functional cell of the chondrocytic cell lineage.

[1029] For example, in certain embodiments, pharmaceutical association or combinations, or compositions according to the present disclosure in which PEP1 is a peptide selected from the group consisting of SNIT, RPVQ and RSVK, have been found to lead to unexpectedly fast conversion of a cancerous cell into a healthy and functional cell of the vascular lineage.

[1030] For example, in certain embodiments, pharmaceutical association or combinations, or compositions according to the present disclosure in which PEP1 is selected from the group consisting of NAIS, SPIS and EPIS, have been found to lead to unexpectedly fast conversion of a cancerous cell into a healthy and functional cell of the neuron lineage.

[1031] For example, in certain embodiments, pharmaceutical association or combinations, or compositions according to the present disclosure in which PEP1 is SPIN, have been found to lead to unexpectedly fast conversion of a cancerous cell into a healthy and functional cell of the eye-retina lineage.

[1032] For example, in certain embodiments, pharmaceutical association or combinations, or compositions according to the present disclosure in which PEP1 is SPIN, have been found to lead to unexpectedly fast conversion of a cancerous cell into a healthy and functional cell of the renal lineage.

[1033] For example, in certain embodiments, pharmaceutical association or combinations, or compositions according to the present disclosure in which PEP1 is a peptide selected from the group consisting of NAIS, SPIS, EPLP and EPLT, have been found to lead to unexpectedly fast conversion of a cancerous cell into a healthy and functional cell of the ligament and tendon lineage.

[1034] For example, in certain embodiments, pharmaceutical association or combinations, or compositions according to the present disclosure in which PEP1 is a peptide selected from the group consisting of EPLP, EPLT, RSVK and RPVQ, have been found to lead to unexpectedly fast conversion of a cancerous cell into a healthy and functional cell of the fibroblast lineage.

[1035] For example, in certain embodiments, pharmaceutical association or combinations, or compositions according to the present disclosure in which PEP1 is NAIS, in which PEP2 is LKKYR, have been found to lead to unexpectedly fast conversion of a cancerous cell into a healthy and functional cell of the reproduction system lineage.

[1036] For example, in certain embodiments, pharmaceutical association or combinations, or compositions according to the present disclosure in which PEP1 is selected from the group consisting of NAIS, SATS, SPIS, EPIS and SPIN, have been found to lead to unexpectedly fast conversion of a cancerous cell into a healthy and functional cell of the lung cell lineage.

[1037] For example, in certain embodiments, pharmaceutical association or combinations, or compositions according to the present disclosure in which PEP1 is selected from the group consisting of RSVK or RPVQ, have been found to lead to unexpectedly fast and qualitatively and quantitatively important muscle cells induction, producing highly functional differentiated cells.

[1038] For example, in certain embodiments, pharmaceutical association or combinations, or compositions according to the present disclosure in which PEP1 is SNIT, have been found to lead to unexpectedly fast conversion of a cancerous cell into a healthy and functional cell of the blood cell lineage.

[1039] For example, in certain embodiments, pharmaceutical association or combinations, or compositions according to the present disclosure in which PEP1 is SAIS or NAIS, have been found to lead to unexpectedly fast conversion of a cancerous cell into a healthy and functional cell of the adipocyte lineage.

[1040] Accordingly, it is possible to achieve the conversion of a neoplastic cell (e.g. a cancer cell) into a non-neoplastic cell (e.g. a functional and/or healthy cell of the bone, chondrocytic, muscle, vascular, neuronal, retinal, renal, ligament, tendon, fibroblast, blood, lung, adipocyte, reproduction system cell lineages) using extracellular, non-mutagenic active principles and is thus useful in the treatment of neoplastic diseases such as cancers.

[1041] The present invention provides a recoding therapy for the treatment of neoplastic diseases, conditions or disorders such as cancer and aims at providing a suitable micro-environment to the neoplastic cell containing suitable biological signals so that the neoplastic cell is able to undergo self-healing and become a functional, healthy, non-neoplastic cell.

[1042] In addition, it has been found that using the recoding therapy of the invention instead of conventional therapies allows for improved treatment selectivity in such a way that reduced or substantially no adverse side-effect is observed. Without wishing to be bound to any specific theory, this may be explained by considering that the present therapy relies on the activation of physiological cell mechanisms without imposing or forcing the treated cell to undergo e.g. apoptosis or cell cycle arrest (which would then most likely unselectively target any cells, healthy and neoplastic) but instead reestablishes the correct cellular microenvironment surrounding this neoplastic cell so that the cell is able to operate self-healing. As a result, a non-neoplastic cell i.e. a cell in which the cell cycle and/or cell adhesion checkpoint(s) need not be repaired, brought in contact with such a microenvironment would be less or not be substantially affected.

[1043] Remarkably, it has also been found that using the pharmaceutical associations or compositions as defined herein allows for the reduction (in most cases, important reduction) of the time of treatment of a neoplastic cell and by extension of a neoplastic disease in comparison with known technologies.

[1044] It is another aspect of the present invention to solve the technical problem of providing a therapy for treating neoplastic diseases being completely or at least partially devoid of one or more, preferably a plurality of the disadvantages of known treatments.

[1045] All combinations of any of the above-mentioned features described in all above part of the present description are specifically contemplated by the Applicant to be within the scope of the present invention unless contradictory in context. Examples of such combinations are detailed throughout the present description.

[1046] Further embodiments and advantages will become apparent to a skilled reader in light of the examples provided below.

### EXAMPLES

[1047] Disclosed and described, it is to be understood that this invention is not limited to the particular examples, process steps, and materials disclosed herein as such process steps and materials may vary somewhat.

[1048] It is also to be understood that the terminology used herein is used for the purpose of describing particular embodiments only and not intended to be limiting since the scope of the present invention will be limited only by the appended claims and equivalents thereof.

[1049] The following Examples are representative of techniques employed by the inventor in carrying out aspects of the present invention. It should be appreciated that while these techniques are exemplary of preferred embodiments for the practice of the invention, those of skill in the art, in light of the present disclosure, will recognize that numerous modifications can be made without departing from the spirit and intended scope of the invention.

[1050] The following starting materials and reagents were used:
[1051] Apatite ceramics (also called apatite or ceramic in the present invention) were synthetized as described in Mater Res. 2004; 7(4): 625-630.
[1052] Titanium was obtained from Goodfellow®.
[1053] Hydrogel (poly(acrylamide-co-acrylic acid) gel) was synthetized as described in Langmuir 2011; 27(22):13635-42.
[1054] PEEK was obtained from Goodfellow®.
[1055] PET (Poly(ethylene terephthtalate) was obtained from Goodfellow®.
[1056] Type-I collagen sponge was obtained from Sigma®.
[1057] Hexane was obtained from Sigma®.
[1058] 3-succinimidyl-3-maleimidopropionate (SMP) was obtained from Sigma®.
[1059] DMF was obtained from Sigma®.
[1060] PBS 1× was obtained from Gibco®.
[1061] 3-(ethoxydimethylsilyl)propylamine was obtained from Sigma®.
[1062] Ammonium persulfate was obtained from Biorad®.
[1063] N,N,N′,N′-tetramethylethylenediamine was obtained from Aldrich®.
[1064] Acrylamid was obtained from Merck®.
[1065] Acrylic acid was obtained from Merck®.
[1066] N,N-methylene-bis-acrylamide was obtained from Merck®.
[1067] NaOH was obtained from Aldrich®.
[1068] N,N,N′,N′-tetramethylethylenediamine was obtained from Aldrich®.
[1069] Dimethylaminopropyl-3-ethylcarbodiimide hydrochloride was obtained from Aldrich®.
[1070] N-hydroxysuccinimide was obtained from Aldrich®.
[1071] 2-(N-morpholino)-ethane sulfonic acid was obtained from Aldrich®.
[1072] MilliQ water: is water characterised in terms of resistivity (typically 18.2 MΩ·cm at 25° C.).
[1073] Low glucose Dulbecco's Modified Eagle Medium (DMEM) was obtained from Invitrogen®
[1074] Minimum Essential Medium Eagle without ascorbic acid (αMEM) was obtained from Invitrogen®.
[1075] All of the cell culture experiments were carried out without any serum in the medium for the first 8 hours of culture.
[1076] Osteosarcoma cells: MG63 cells were obtained from ATCC®. These cells were cultured in DMEM (Eagle's Minimum Essential Medium) medium supplemented with 10% fetal calf serum (FCS) and 1% penicillin/streptomycin. All cells were used at a low passage number (passage 10), were subconfluently cultured and were seeded at 10⁴ cells/cm² for the purpose of the experiments.
[1077] Chondrosarcoma cells: Hs819.T cells were obtained from ATCC®. These cells were cultured in DMEM (Eagle's Minimum Essential Medium) medium supplemented with 10% fetal calf serum (FCS) and 1% penicillin/streptomycin. All cells were used at a low passage number (passage 10), were subconfluently cultured and were seeded at 10⁴ cells/cm² for the purpose of the experiments.
[1078] Rhabdomyosarcoma cells: A-673 cells were obtained from ATCC®. These cells were cultured in DMEM (Eagle's Minimum Essential Medium) medium supplemented with 10% fetal calf serum (FCS) and 1% penicillin/streptomycin. All cells were used at a low passage number (passage 10), were subconfluently cultured and were seeded at 10⁴ cells/cm² for the purpose of the experiments.
[1079] Adenocarcinoma cells: HCC4006 cells were obtained from ATCC®. These cells were cultured in RPMI-1640 medium (obtained from ATCC®) supplemented with 10% fetal calf serum (FCS) and 1% penicillin/streptomycin. All cells were used at a low passage number (passage 10), were subconfluently cultured and were seeded at 10⁴ cells/cm² for the purpose of the experiments.
[1080] CMFDA is a Cell Tracker Green obtained from Invitrogen®.
[1081] DAPI was obtained from Sigma®.
[1082] Fetal bovine serum (FBS) was obtained from Gibco®.
[1083] Penicillin/streptomycin was obtained from Invitrogen®.
[1084] The AlamarBlue® assay was obtained from Molecular Probes®.
[1085] Anti phospho-p53 antibody was obtained from Santa Cruz Biotechnology®,
[1086] Anti pRB antibody was obtained from Santa Cruz Biotechnology®,
[1087] Monoclonal anti-integrin (extracellular domain) αv, α5, α3, α4, β1, β3, β5 and β9 antibodies were obtained from Santa Cruz Biotechnology®,
[1088] Cell cytoskeletal filamentous actin (F-actin) was visualized by Alexa Fluor® 488 phalloidin Sigma® labeling.
[1089] Monoclonal anti-vinculin antibody (clone hVIN-1, produced in mouse) was obtained from Sigma®.
[1090] Primers for Cyclin D1: 5′-CCGTCCATGCGGAAGATC-3′ (Forward) and 5′-GAAGACCTCCTCCTCGCACT-3′ (Reverse) were obtained from Invitrogen®.
[1091] Primers for Cyclin D2: 5′-CATCCAACCGTACATGCGCAG-3′ (Forward) and 5′-CATGGCCAGAGGAAAGACCTC-3′ (Reverse) were obtained from Invitrogen®.
[1092] Primers for Cyclin D3: 5′-TGATTTCCTGGCCTTCATTC-3′ (Forward) and 5′-CGGGTACATGGCAAAGGTAT-3′ (Reverse) were obtained from Invitrogen®.
[1093] Primers for Paxillin: 5′-AATTCCAGTGCCTCCAACAC-3′ (Forward) and 5′-GAGCTCATGACGGTAGGTGA-3′ (Reverse) were obtained from Invitrogen®.
[1094] Primers for Vinculin: 5′-GCCAAGCAGTGCACAGATAA-3′ (Forward) and 5′-TTCCTTTCTGGTGTGTGAAGC-3′ (Reverse) were obtained from Invitrogen®.
[1095] Primers for DMP-1: 5′-AGCATCCTGCTCATGTTCCTTT-3′ (Forward) and 5′-GAGCCAAATGACCCTTCCATT-3′ (Reverse) were obtained from Invitrogen®.
[1096] Primers for Sclerostin: 5′-CTTAGTTTTCTCAGTCTGTGGTTGAAAT-3′ (Forward) and 5′-AGAGTACCCCGAGCCTCC-3′ (Reverse) were obtained from Invitrogen®.
[1097] Primers for RANK-L: 5′-CTCAGCCTTTTGCTCATCTCACT-3′ (Forward) and 5′-CCAAGAGGACAGACTCACTTTATGG-3′ (Reverse) were obtained from Invitrogen®.
[1098] Primers for MLC-1: 5′-AGAAGGGCTCCATGTCTGACA-3′ (Forward) and 5′-AAGATTTCAGGACCCGAGCAG-3′ (Reverse) were obtained from Invitrogen®.
[1099] Primers for GATA-4: 5′-AGGCCTCTTGCAATGCGGA-3′ (Forward) and 5′-CTGGTGGTGGCGTTGCTGG-3′ (Reverse) were obtained from Invitrogen®.
[1100] Primers for *-Sarcomeric actin: 5′-GACCACAGCTGAACGTGAGA-3′ (Forward) and 5′-CATAGCACGATGGTCGATTG-3′ (Reverse) were obtained from Invitrogen®.
[1101] Primers for Sox9: 5′-GACTTCCGCGACGTGGAC-3′ (Forward) and 5′-GTTGGGCGGCAGGTACTG-3′ (Reverse) were obtained from Invitrogen®.
[1102] Primers for IBSP: 5′-TGCCTTGAGCCTGCTTCC-3′ (Forward) and 5′-GCAAAATTAAAGCAGTCTTCATTTTG-3′ (Reverse) were obtained from Invitrogen®.
[1103] Primers for Collagen IV: 5′-CCTGGTCTTGAAAGGTGATAAG-3′ (Forward) and 5′-CCCGCTATCCCTTGATCTC-3′ (Reverse) were obtained from Invitrogen®.
[1104] Primers for Vimentin: 5′-TGTCCAAATCGATGTGGATGTTTC-3′ (Forward) and 5′-TTGTACCATTCTTCTGCCTCCTG-3′ (Reverse) were obtained from Invitrogen®.
[1105] Primers for MMP-9: 5′-AATCTCTTCTAGAGACTGGGAAGGAG-3′ (Forward) and 5′-AGCTGATTGACTAAAGTAGCTGGA-3′ (Reverse) were obtained from Invitrogen®.
[1106] Primers for *-SMA: 5′-CCGACCGAATGCAGAAGGA-3′ (Forward) and 5′-ACAGAGTATTTGCGCTCCGAA-3′ (Reverse) were obtained from Invitrogen®.
[1107] Primers for GAPDH: 5′-GCAGTACAGCCCCAAAATGG-3′ (Forward) and 5′-ACAAAGTCCGGCCTGTATCCAA-3′ (Reverse) were obtained from Invitrogen®.
[1108] All of the peptides were synthetized using conventional solution and/or solid phase peptide synthesis methods.
[1109] All of the experiments were performed with a concentration of 400 ng/mL of GFR-binding compound(s) as defined herein.
[1110] All cell culture experiments were performed with cultures on plastic coated with type-I collagen in order to mimic the physiological conditions of the human body.

[1111] The following general methods and procedures were used:

[1112] X-Ray Photoelectron Spectroscopy:

[1113] For X-ray photoelectron spectroscopy, AVG Scientific ESCALAB photoelectron spectrometer was used for the surface analysis with a non-monochromatized MgK 1253.6 eV source of 100 W. The area of the analytical X-ray spot on the sample surface was about 200 μm². A 45° insert angle that corresponds to about 5 nm of analyzed depth was used. A flood gun was used for charge compensation. Acquisition of high resolution spectra was performed at constant pass energy of 20 eV.

[1114] Immunostaining:

[1115] The cells were first fixed for 20 min with 4% paraformaldehyde/PBS at 4° C. After fixation, the cells were permeabilized in PBS containing 1% Triton X-100 for 15 min. Protein immunofluorescent visualization was performed by first treating the cells with 1% (v/v) specific monoclonal antibodies for 1 hour at 37° C. Then the samples were incubated with Alexa fluor® 568 or 647 (F(ab′)2 fragment of IgG(H+L)) during 30 min at room temperature. The cell nuclei were counterstained in 20 ng/mL DAPI for 10 min at room temperature.

[1116] Quantification of Positive Contact Numbers and Areas:

[1117] For this type of quantification the freeware image analysis ImageJ® software was used. The raw image was first converted to an 8-bit file, and then the unsharp mask feature was used (settings 1:0.2) to remove the image background (rolling ball radius 10). After smoothing, the resulting image, which appears similar to the original photomicrograph but with minimal background, was then converted to a binary image by setting a threshold. Threshold values were determined empirically by selecting a setting, which gave the most accurate binary image for a subset of randomly selected photomicrographs. The cell area was determined by manual delineation on raw fluorescent images. Total contact area and mean contact area per cell were calculated by “analyse particules” in ImageJ®. A minimum of 50 cells per condition were analyzed.

[1118] Quantitative Real Time Polymerase Chain Reaction (RT-PCR):

[1119] After 24 hours of culture, total RNA was extracted by using the RNeasy total RNA kit (Qiagen®) according to the manufacturer's instructions. Purified total RNA was used as a template in order to make cDNA by a reverse transcription reaction (Gibco Brl®) with random primers (Invitrogen®). The cDNA was then used as a template for a real-time PCR amplification in the presence of SYBR green reagents (Bio-Rad®) by using a thermocycler (iCycler, Biorad®). Data were analyzed with the iCycler IQ™® software and compared by the ΔΔCt method. Briefly, the mean Ct value of the target gene was normalized to its averaged Ct values of the housekeeping gene (GAPDH) to give a ΔCt value, which was then normalized to a control sample to obtain a ΔΔCt value. The results were obtained from two series of experiments performed in triplicate.

[1120] Western Blot:

[1121] After 24 hours of culture, cells were permeabilized (10% SDS, 25 mM NaCl, 10 nM pepstatin and 10 nM leupeptin in distilled water and loading buffer), boiled for 10 minutes and resolved by reducing PAGE (Invitrogen). Proteins were transferred onto nitrocellulose, blocked, and labeled with HRP-conjugated antibodies (Invitrogen). Integrin αv, α5, α3, α4, β1, β3, β5 and β9 were blotted by treating the nitrocellulose with monoclonal anti-integrin (extracellular domain) αv, α5, α3, α4, β1, β3, β5 and β6 antibodies (Santa Cruz Biotechnology). Phosphor-Smad1/5/8 was blotted by treating the nitrocellulose with monoclonal anti-p-Smad1/5/8 (Santa Cruz Biotechnology). For all of the experiments the western blot was performed in triplicate, along with an additional blot for actin and coomassie blue staining to ensure constant protein load among samples.

[1122] Determination of Peptide Densities by High Resolution μ-Imager:

[1123] In contrast to scintillation counting, beta-imager performances in the field of sensitivity, linearity and spatial resolution give a real interest to this system as a new imaging device for solid surface. The detection principle is no longer based on the counting of electron avalanches produced in the gas, but it is based on the analysis of light emitted during the interaction. Beta radioactivity is directly detected by means of a parallel plate avalanche chamber, which is particularly well suited for qualitative and quantitative autoradiography.

[1124] Quantitatively, peptide concentration was evaluated by grafting ¹³¹I-peptide alone and by grafting ¹³¹I-peptide in the presence of RGD peptides. For example, polymer samples were placed in a solution of ¹³¹I-peptide diluted in peptide solution (1×10⁻³ M). Radioactivity of this latter solution was adjusted to 6 μCi/mL. The amount C of radiolabeled ¹³¹I-peptide grafted onto the surface (in nmol/mm²) was calculated according to the following formula:

C=A×C₀/A₀

[1125] where A is activity of the as-treated samples (in counts per minute/mm²); C₀ the peptide concentration in the incubation solution (in g/L); A₀ the activity of 1 mL of mother solution (in cpm/L). This latter activity was calibrated by using the b-Vision™ Biospace software to determine the relationship between the μCi and cpm/L units. Such a fitting was performed by measuring the activities of given dilute solutions. By measuring the radioactivity of 10 solutions with β-Imager, A0 was determined to be equal to 1.0 10¹⁰ cpm/L.

[1126] To evaluate the stability of the grafted peptides in water, the ¹³¹I-peptides activity (in cpm/mm²) was calibrated for each analysis. Calibration of the entire probed area was first performed by setting the signal corresponding to the beta activity of 14C standard slides to a constant level. The ¹³¹I-peptides radioactive decay was finally taken into account since its half-life (90 days) is not negligible vs. the experiments duration. Moreover, the high resolution μ-imager provides information about the radiolabeled amino acids distributed onto the surface and proves the homogeneity of the grafting.

[1127] Statistical Analysis:

[1128] In terms of real-time PCR assay, all of the data were expressed as mean±standard error, and analyzed statistically by the paired Student's t test method.

[1129] General Procedures Used for the Covalent Association Between GFR-Binding Compound(s) and Bioactive Carrier are as Follows:

[1130] Method 1: Surface Preparation and Covalent Association with Hydrogels (Such as PLLA)

[1131] The preparation of poly(acrylamide-co-acrylic acid) gel substrates was shown as an example in order to illustrate the effect of the GFR-binding compound(s) as defined herein. The synthesis of hydrogels is based on acrylamide and acrylic acid by polymerization in the presence of N,N′-methylene-bis-acrylamide as a cross-linker in an aqueous medium. Practically, 0.3 g of acrylamide (AM, Merck) has been dissolved in 5 mL of PBS 1× (Invitrogen). 30 μL of acrylic acid (AA, Merck), then ×g (function as the stiffness) of N,N-methylene-bis-acrylamide was added under stirring. Then, a NaOH solution (1 M, Aldrich) was added dropwise to reach a pH 8. The formation of hydrogel proceeded via free radical polymerization. The starting solution was degassed during 10 min by bubbling nitrogen in order to remove the oxygen which acts as an inhibitor for the free radical polymerization process. Nitrogen atmosphere was maintained above the solution and 50 μL (corresponding to 1/100 of the total volume) of Ammonium persulfate 10% (Biorad), (free radical initiator) and then 5 μL (corresponding to 1/1000 of total volume) of N,N,N′,N′-tetramethylethylenediamine (catalyst, Aldrich) were added. The polymerizing solution was vortexed gently. Promptly, 0.5 mL of this gel solution was placed before polymerization on a glass slide and another slide was placed on the top of this structure. Reactivity ratios calculated by the Finemann-Ross and Kelen-Tudos methods showed that the copolymers were random with a reactivity ratio of rAM=3.76 and rAA=0.28. The materials obtained here have various stiffnesses ranging from 0.1 to 600 kPa.

[1132] Chemical functionalization with GFR-binding compound(s) as defined herein of poly(acrylamide-co-acrylic acid) gel substrates was performed via the —COOH (carboxyl) functions of their surface. Hydrogels were immersed in a solution of dimethylaminopropyl-3-ethylcarbodiimide hydrochloride (EDC, 0.2 M)+N-hydroxysuccinimide (NHS, 0.1 M) in 2-(N-morpholino)-ethane sulfonic acid (MES buffer, 0.1 M in MilliQ water) overnight at room temperature without stirring and then rinsed in MilliQ water (50 mL during 30 min). The immobilization of the GFR-binding compound(s) as defined herein was achieved in a solution of peptides/PBS 1× (C=10⁻³ M) for 18 hours at room temperature by using an orbital shaker. After grafting, the modified hydrogels were rinsed with PBS 1× for one week.

[1133] Method 2: Covalent Association with Solid Materials (Such as Ceramics or Titanium)

[1134] The material modifications were performed in a controlled Atmosphere (Ar Atmosphere, Glove Box). The strategy for covalent modification of GFR-binding compound(s) as defined herein involved (1) grafting of (3-aminopropyl)-triéthoxysilane (concentration of 1×10⁻²M, 4 hours) onto the surface of the biopolymer, (2) substitution of the terminal amine by a hetero-bifunctional cross-linker, a 3-succinimidyl-3-maleimidopropionate (concentration of 1×10⁻³M, 4 hours) in order to (3) reacting of the “outer” maleimide group with the GFR-binding compound(s) as defined herein (concentration of 1×10⁻³M, 18 hours) via a thiol group present in the terminal cysteine. After grafting, the modified materials were rinsed with PBS 1× buffer for 5 days.

### Example 3: Covalent Association with Polymers (Such as PET or PEEK)

[1135] The polymer used in this study is poly(ethylene terephthalate) (PET). The polymers were first treated in order to create —COOH (carboxyl) functions on the PET surfaces from —OH (hydroxyl) functions. Next, the PET-COOH samples were immersed in a solution of dimethylaminopropyl-3-ethylcarbodiimide hydrochloride (EDC, 0.2 M)+N-hydroxysuccinimide (NHS, 0.1 M) in 2-(N-morpholino)-ethanesulfonic acid (MES) buffer (0.1 M in MilliQ water) and the samples were rinsed in MilliQ water (50 mL for 30 min). The same protocol was used for all the polymers containing —OH (hydroxyl) functions on their extreme surface. Finally, the covalent immobilization of the peptides was achieved by using a solution of peptides/1×PBS (C=10⁻³ M) incubated for 18 hours at room temperature. After grafting, the materials were rinsed in MilliQ water (100 ml) for 1 week.

### Example 1: Covalent Association Between GFR-Binding Compounds of the Present Disclosure and Titanium

[1136] The bioactive carrier modifications were performed in a controlled atmosphere (Ar Atmosphere, Glove Box). The strategy for covalent association or immobilization of GFR-binding compounds involved (1) the association or grafting of (3-aminopropyl)-triethoxysilane (concentration of 1×10⁻² M, 4 hours) onto the surface of the bioactive carrier, (2) substitution of the terminal amine by a hetero-bifunctional cross-linker: a 3-succinimidyl-3-maleimidopropionate (concentration of 1×10⁻³ M, 4 hours) in order to (3) react the “outer” maleimide group with a GFR-binding compound (concentration of 1×10⁻³ M, 24 hours) via a thiol group present in the terminal cysteine. After covalent association, the covalent pharmaceutical associations were rinsed with Phosphate Buffered Saline (PBS 1×) buffer for 5 days. PBS is a buffer solution commonly used in the biological research. It is a water-based salt solution containing sodium phosphate, sodium chloride and, in some formulations, potassium chloride and potassium phosphate.

[1137] The osmolarity and ion concentrations of the solutions match those of the human body (isotonic) and are thus physiological and non-toxic to the cells.

[1138] The bioactive carrier surface was characterized by covalently associating fluorescent GFR-binding compounds (herein SEQ ID NO: 1 coupled to fluorescein isothiocyanate (FITC), FIG. 1) and X-ray photoelectron spectroscopy (Table 1). The X-ray photoelectron spectroscopy was performed as described above.

[1139] The results presented in Table 1 were obtained with a titanium alloy material (Ti6Al4V metal alloy pellets) as bioactive carrier covalently associated with GFR-binding compounds of SEQ ID NO: 2 to 6.

TABLE 1

| | At. | At. |
|---|---|---|
| Name | % C1s | % N1s |
| Titanium | 29.07 | no detection |
| Titanium grafted covalently with SEQ ID NO: 2 | 43.65 | 5.87 |
| Titanium grafted covalently with SEQ ID NO: 3 | 42.02 | 5.47 |
| Titanium grafted covalently with SEQ ID NO: 4 | 39.95 | 5.11 |
| Titanium grafted covalently with SEQ ID NO: 5 | 40.58 | 5.2 |
| Titanium grafted covalently with SEQ ID NO: 6 | 44.01 | 4.89 |

[1140] Example 2: Covalent Association Between GFR-Binding Compound(s) of the Present Disclosure and PEEK

[1141] A polyetheretherketone (PEEK) was treated with ethylene diamine (NH₂═NH₂) to create —NH₂ (amine) functions on the PEEK surfaces from ketone (═O) functions. Next, the PEEK-NH₂ samples were immersed in a solution of a hetero-bifunctional cross-linker: a 3-succinimidyl-3-maleimidopropionate (concentration of 1×10⁻³ M, 4 hours) in order to react with the “outer” maleimide group with the GFR-binding compound(s) of SEQ ID NO: 7 (concentration of 1×10⁻³ M, 24 hours) via a thiol group present in the terminal cysteine thereof. After covalent association, the pharmaceutical association was rinsed with PBS 1× for 5 days.

[1142] The bioactive carrier surface was characterized by covalently associating fluorescent GFR-binding compounds of SEQ ID NO: 7 and by other methods such as X-ray photoelectron spectroscopy (Table 2). The X-ray photoelectron spectroscopy was performed as described above.

[1143] The results presented in Table 2 were obtained by with a PEEK material as a bioactive carrier covalently associated with a GFR-binding compound of SEQ ID NO: 7.

TABLE 2

| | At. | At. |
|---|---|---|
| Name | % C1s | % N1s |
| PEEK | 86.56 | no detection |
| PEEK grafted covalently with SEQ ID NO: 7 | 71.61 | 4.98 |

### Example 3: Covalent Association Between GFR-Binding Compound(s) of the Present Disclosure and PLLA

[1144] PLLA (Polylactic acid) was immersed in a solution of dimethylaminopropyl)-3-ethylcarbodiimide hydrochloride (EDC, 0.2 M)+N-hydroxysuccinimide (NHS, 0.1 M) in (2-(N-morpholino)-ethanesulfonic acid (MES buffer, 0.1 M in MilliQ water) and then rinsed in MilliQ water (during 30 min). The covalent association was performed in a solution of GFR-binding compounds of SEQ ID NO: 8 (concentration of 1×10⁻³ M, 18 hours, room temperature). After the covalent association, the pharmaceutical association was rinsed with PBS 1× for 5 days.

[1145] The bioactive carrier surface was characterized by covalently associating fluorescent GFR-binding compounds of SEQ ID NO: 8 and by using other methods such as X-ray photoelectron spectroscopy (Table 3). The X-ray photoelectron spectroscopy was performed as described above.

[1146] The results presented in Table 3 were obtained by using PLLA as bioactive carrier covalently associated with a GFR-binding compound of SEQ ID NO: 8.

TABLE 3

| | At. | At. |
|---|---|---|
| Name | % C1s | % N1s |
| PLLA | 69.02 | no detection |
| PLLA grafted covalently with SEQ ID NO: 8 | 72.31 | 5.07 |

### Example 4: Non-Covalent Association Between GFR-Binding Compound(s) and Bioactive Carrier(s) of the Present Disclosure

[1147] Non-covalent associations of the bioactive carriers were performed under atmospheric conditions (air) at room temperature (about 22° C.). The non-covalent association was carried out using a mixture of GFR-binding compound of SEQ ID NO: 9 (concentration of 1×10⁻³ M) with the apatite ceramics or a mixture of GFR-binding compound of SEQ ID NO: 10 (concentration of 1×10⁻³ M) with the type-I collagen sponge. The non-covalent pharmaceutical associations were characterized by covalently associating fluorescent GFR-binding compounds of SEQ ID NO: 9 and 10 (covalently bound to fluorescein isothiocyanate (FITC), FIG. 1). The results shown in FIG. 1 were obtained from experiments performed with apatite ceramics and a type-I collagen sponge and demonstrates that the interaction between the GFR-binding compounds and the apatite ceramics or the type-I collagen is stable as no significant release of GFR-binding compounds was observed after 3, 7 or 10 days (FIGS. 2a and b).

### Example 5: Osteosarcoma Recoding

[1148] Selected GFR-binding compounds (SEQ: ID NO: 11 to 20) were covalently associated with PET using a method described above and contacted with human osteosarcoma cells (obtained from ATCC®). The mixtures tumor cells/pharmaceutical association were then cultured in Dulbecco's Modified Eagle Medium (DMEM, Invitrogen®) supplemented with 10% (v/v) fetal bovine serum (FBS), 1% penicillin/streptomycin and incubated in a humidified atmosphere containing 5% (v/v) CO₂ at 37° C. All of the cell culture experiments were performed without any serum in the medium for the first 8 hours of culture. All cells were used at a low passage number (≤passage 10), were subconfluently cultured and were seeded at 10 000 cells/cm² for the purpose of the experiments.

[1149] The cell phenotype was analyzed after 24 hours of cell culture. The vast majority (>98%) of the human osteosarcoma cells adhere, spread, and differentiate into osteocyte cells as confirmed by analysis of DMP-1 (Dentin matrix acidic phosphoprotein 1), Sclerostin and RANK-L (receptor activator of nuclear factor kappa B ligand) expression (FIG. 3a). During cell recoding, osteosarcoma cells undergo important changes in their cell morphology such as cell shape modification, cell body size reduction and increase in cell processes in order to obtain the characteristic osteocyte morphology as shown in FIG. 3b wherein, after 18 and 24h of cell culture, the cells were immunostained with labeled antibodies against actin in order to visualize and monitor the actin cytoskeleton, previously reported to play an important role in the establishment of the osteocyte morphology (FIG. 3b). The cells were also stained with antibodies against vinculin as a cytoplasmic focal cell adhesion marker in order to visualize in detail the cell morphology. The observed morphologies of the recoded cells were compared with the osteosarcoma cell morphology, immunostained using the same procedure. After 24 hours of cell culture the immunofluorescence labeling shows that the cell shape has already undergone some significant modifications and that the dendritic processes have already started (FIG. 3b). These cells presented a characteristic dendritic-like morphology, a total reduction in cell body volume of around 50% and expressed a set of known osteocytic markers. These results demonstrate that GFR-binding compounds associated with bioactive carrier both as defined herein induce the recoding of human osteosarcoma cells into osteocytes in a short period of time (24 hours).

### Example 6: Rhabdosarcoma Recoding

[1150] Selected GFR-binding compounds (SEQ: ID NO: 21 to 30) were covalently associated with PET using a method described above and contacted with human rhabdosarcoma cells (obtained from ATCC®). The mixtures tumor cells/pharmaceutical association were then cultured in Dulbecco's Modified Eagle Medium (DMEM, Invitrogen®) supplemented with 10% (v/v) fetal bovine serum (FBS), 1% penicillin/streptomycin and incubated in a humidified atmosphere containing 5% (v/v) CO₂ at 37° C. All cell culture experiments were performed without any serum in the medium for the first 8 hours of culture. All cells were used at a low passage number (≤passage 10), were subconfluently cultured and were seeded at 10 000 cells/cm² for the purpose of the experiments.

[1151] It was observed that these tumor cells were converted into muscle cells (myocyte like-cells) in the presence of pharmaceutical associations of the invention by analyzing the expression of the myogenic biomarkers MLC-1 (myocyte light chain 1), GATA-4 and □-Sarcomeric actin. An increased expression of these genes was observed after 24 hours of culture (FIG. 4). For that, a Quantitative Real Time PCR was performed as described in the Methods section.

### Example 7: Mesenchymal Chondrosarcoma Recoding

[1152] Selected GFR-binding compounds (SEQ: ID NO: 31 to 40) were covalently associated with PET using a method described above and contacted with human rhabdosarcoma cells (obtained from ATCC®). The mixtures tumor cells/pharmaceutical association were then cultured in Dulbecco's Modified Eagle Medium (DMEM, Invitrogen®) supplemented with 10% (v/v) fetal bovine serum (FBS), 1% penicillin/streptomycin and incubated in a humidified atmosphere containing 5% (v/v) CO₂ at 37° C. All cell culture experiments were performed without any serum in the medium for the first 8 hours of culture. All cells were used at a low passage number (≤passage 10), were subconfluently cultured and were seeded at 10 000 cells/cm² for the purpose of the experiments.

[1153] It was observed that these tumor cells were converted into cartilage cells (chondrocyte like-cells) in the presence of pharmaceutical associations of the invention by analyzing the expression of the chondrocytic biomarkers Sox9, IBSP (Sialoprotein II) and collagen IV. An increased expression of these genes was observed after 24 hours of culture (FIG. 5). For that a Quantitative Real Time PCR was performed as described in the Methods section.

### Example 8: Adenocarcinoma Recoding

[1154] Selected GFR-binding compounds (SEQ: ID NO: 41 to 50) were covalently associated with PET using a method described above and contacted with human adenocarcinoma cells (obtained from ATCC®). The mixtures tumor cells/pharmaceutical association were then cultured in RPMI-1640 medium supplemented with 10% (v/v) fetal bovine serum (FBS), 1% penicillin/streptomycin and incubated in a humidified atmosphere containing 5% (v/v) CO₂ at 37° C. All cell culture experiments were performed without any serum in the medium for the first 8 hours of culture. All cells were used at a low passage number (≤passage 10), were subconfluently cultured and were seeded at 10 000 cells/cm² for the purpose of the experiments.

[1155] It was observed that these tumor cells were converted into epithelial cells (fibrocyte like-cells) in the presence of pharmaceutical associations of the invention by analyzing the expression of the fibrocytic biomarkers MMP-9, Vimentin and α-SMA. An increased expression of these genes was observed after 24 hours of culture (FIG. 6). For that a Quantitative Real Time PCR was performed as described in the Methods section.

### Example 9: Recoding of Neoplastic Cells Demonstrated by Significant Reduction of Proliferation Markers

[1156] Neoplastic cells (in this example osteosarcoma cells) were cultured on pharmaceutical associations comprising PET as a bioactive carrier and one of GFR-binding compounds of SEQ ID NO: 11 to 14, 24 to 26 and 51 to 63. A rapid (24 hours) decrease of the tumor markers was observed (FIG. 7). The adhesion checkpoint then activates the tumor suppressor proteins p53 and pRB. It was observed that, in tumor cells cultured on pharmaceutical associations of the invention, the expression of p53 decreases as demonstrated by quantification of protein expression level (immunofluorescence staining and quantification using ImageJ as described in the general methods section) (FIG. 7A) and the pRB is dephosphorylated as demonstrated by a quantification of protein phosphorylation level (immunofluorescence staining and subsequent quantification by using the ImageJ software as described in the general methods section) (FIG. 7B).

### Example 10: Adhesion Checkpoint Activation

[1157] Neoplastic cells (in this example osteosarcoma cells) were cultured on pharmaceutical associations comprising PET as a bioactive carrier and one of GFR-binding compounds of SEQ ID NO: 12, 19, 30 or 39. The main signaling pathways include: Ras/MAP kinase, FAK/Src kinase and PIP2 which are decreased after 24 hours as shown by western blot quantifications (FIG. 8). This demonstrated by the absence of phosphorylation at Thr202 and Tyr204 on ERK (FIG. 8A). Moreover, no phosphorylation at Thr416 but phosphorylation of Tyr527 was observed on Src kinase (FIG. 8B). Finally, a decrease of 3-phosphoinositide-dependent protein kinase 1 (PDK1) protein expression was also was observed (FIG. 8C).

### Example 11: Decrease of Paxillin and Vinculin Gene Expression

[1158] Neoplastic cells (in this example osteosarcoma cells) were cultured on pharmaceutical associations comprising PET as a bioactive carrier and one of GFR-binding compounds of SEQ ID NO: 12, 19, 30 or 39. After 24 hours, the Paxillin and Vinculin gene expression decreased as shown by RT-PCR (FIG. 9).

### Example 12: Cyclin D Profile

[1159] Neoplastic cells (in this example osteosarcoma cells) were cultured on pharmaceutical associations comprising PET as a bioactive carrier and one of GFR-binding compounds of SEQ ID NO: 12, 19, 30 or 39. The Cyclin D (the arithmetic mean of Cyclin D1, Cyclin D2 and Cyclin D3) gene expression decreased after the first 30 min of cell culture as shown by RT-PCR (FIG. 10). These data indicate the entry of the cells into G0 quiescence phase.

### Example 13: GFR-Binding Compound Density Calculation

[1160] The density of the GFR-binding compound(s) on bioactive carriers is measured using radio-labeled molecules according to the procedure described above in the Methods section and was found to lie between 0.3 and 2.8 pmol/mm² depending on the size of the GFR-binding compound (SEQ ID No: 13, 20 or 56) (FIG. 11).

### Example 14: Growth Factor Receptor Activation

[1161] The data summarized in Table 4 below demonstrate that the tumor cell recoding action ((in this example: human osteosarcoma cells, MG63, via quantification of pRB) of pharmaceutical associations according to certain embodiments of the present disclosure involves the activation of growth factor receptors as demonstrated by the activation of the Smad1/5/8 signaling pathway (via quantification of western blots of phospho-smad1/5/8):

TABLE 4

| | | p-Smad1/ | pRB |
|---|---|---|---|
| SEQ ID No | AA sequences | 5/8 (%) | (%) |
| SEQ ID NO: 64 | SIPKASSTPTELSPINMLYF | 37 | 23 |
| SEQ ID NO: 65 | TKPTSTPTKLSPINMLYF | 36 | 10 |
| SEQ ID NO: 66 | YVPKPSSTPTKLSPINMLYF | 38 | 8 |
| SEQ ID NO: 67 | ASAAPSSVPQALSSLSILFF | 38 | 15 |
| SEQ ID NO: 68 | ASASPSSVSQDLSSLSILFF | 40 | 14 |
| SEQ ID NO: 69 | VVPKPSSAPTQLEPISILYL | 39 | 20 |
| SEQ ID NO: 70 | AVPKASSAPTKLEPISILYL | 67 | 21 |
| SEQ ID NO: 71 | KVGKASSVPTKLEPISILYL | 66 | 17 |
| SEQ ID NO: 72 | SSVKSQPSRVHHKPLSMLYV | 47 | 19 |
| SEQ ID NO: 73 | RNVQSRPTQVQLKPLSMLYV | 48 | 16 |
| SEQ ID NO: 74 | KIPKASSVPQELEPLPIVYY | 44 | 9 |
| SEQ ID NO: 75 | GIPEPSSVPQKMEPLPIVYY | 51 | 10 |
| SEQ ID NO: 76 | SIPKASSVPQELEPLPIVYY | 54 | 8 |
| SEQ ID NO: 77 | ASAAPSSVPQALEPLTILYY | 55 | 15 |
| SEQ ID NO: 78 | ASASPSSVSQDLEPLTILYY | 52 | 18 |
| SEQ ID NO: 79 | NDEGLESVPTEEEPLTILYY | 58 | 17 |
| SEQ ID NO: 80 | NDEGLESVPTEESSLSILFF | 27 | 9 |
| SEQ ID NO: 81 | RVPSTSSAPTKTSATSVLYY | 34 | 17 |
| SEQ ID NO: 82 | ASAAPSSAPTALSATSVLYY | 41 | 19 |
| SEQ ID NO: 83 | TVPKPSSAPTQLRSVKVAKV | 35 | 12 |
| SEQ ID NO: 84 | KVGKASSVPQKLEPLPIVYY | 33 | 9 |
| SEQ ID NO: 85 | KASKASSVPQKLEPLPIVYY | 22 | 10 |
| SEQ ID NO: 86 | RNVQSRPVPTQLSPISVLYK | 26 | 24 |
| SEQ ID NO: 87 | KIPKASSVPTELSPISVLYK | 32 | 21 |
| SEQ ID NO: 88 | ASAAPSSVPQALRSVKVAKV | 37 | 18 |
| SEQ ID NO: 89 | VSQDLRSVKVAKV | 36 | 17 |
| SEQ ID NO: 90 | ASASPSSVPQDLRSVKVAKV | 56 | 9 |
| SEQ ID NO: 91 | NDEGLESVPTEERSVKVAKV | 55 | 12 |
| SEQ ID NO: 92 | TQVKMRPVQVRKI | 44 | 8 |
| SEQ ID NO: 93 | KIPKASSTPTELSPINMLYF | 47 | 7 |
| SEQ ID NO: 94 | GIPEPSSTPTKMSPINMLYF | 39 | 9 |
| SEQ ID NO: 95 | VPTGQSAISMLYL | 52 | 17 |
| SEQ ID NO: 96 | NDEGLESVPTEESAISMLYL | 78 | 22 |
| SEQ ID NO: 97 | SSVKSQPSRVHHSPISILFI | 39 | 14 |
| SEQ ID NO: 98 | RNVQSRPTQVQLSPISILFI | 34 | 17 |
| SEQ ID NO: 99 | YVPKPSSAPTKLNAISVLYF | 66 | 21 |
| SEQ ID NO: 100 | HVPKPSSAPTKLEPISILYL | 75 | 19 |

### Example 15: RMSD Measurement and Recoding Activity

[1162] The data summarized in Table 5 below demonstrate that pharmaceutical associations according to certain embodiments of the present disclosure containing GFR-binding compounds as disclosed herein having a RMSD value of 2.45 Å or less, induce the particularly efficient recoding (as shown via quantification of pRB) of neoplastic cells (in this example: human osteosarcoma cells, MG63) into healthy cells:

TABLE 5

| | | RMSD | pRB |
|---|---|---|---|
| SEQ ID No | AA sequences | (Å) | (%) |
| SEQ ID NO: 64 | SIPKASSTPTELSPINMLYF | 0.73 | 23 |
| SEQ ID NO: 65 | TKPTSTPTKLSPINMLYF | 0.96 | 10 |
| SEQ ID NO: 66 | YVPKPSSTPTKLSPINMLYF | 0.77 | 8 |
| SEQ ID NO: 67 | ASAAPSSVPQALSSLSILFF | 0.81 | 15 |
| SEQ ID NO: 68 | ASASPSSVSQDLSSLSILFF | 0.79 | 14 |
| SEQ ID NO: 69 | VVPKPSSAPTQLEPISILYL | 0.72 | 20 |
| SEQ ID NO: 70 | AVPKASSAPTKLEPISILYL | 0.79 | 21 |
| SEQ ID NO: 71 | KVGKASSVPTKLEPISILYL | 0.79 | 17 |
| SEQ ID NO: 72 | SSVKSQPSRVHHKPLSMLYV | 0.71 | 19 |
| SEQ ID NO: 73 | RNVQSRPTQVQLKPLSMLYV | 0.79 | 16 |
| SEQ ID NO: 74 | KIPKASSVPQELEPLPIVYY | 0.84 | 9 |
| SEQ ID NO: 75 | GIPEPSSVPQKMEPLPIVYY | 0.85 | 10 |
| SEQ ID NO: 76 | SIPKASSVPQELEPLPIVYY | 0.82 | 8 |
| SEQ ID NO: 77 | ASAAPSSVPQALEPLTILYY | 0.87 | 15 |
| SEQ ID NO: 78 | ASASPSSVSQDLEPLTILYY | 0.91 | 18 |
| SEQ ID NO: 79 | NDEGLESVPTEEEPLTILYY | 0.83 | 17 |
| SEQ ID NO: 80 | NDEGLESVPTEESSLSILFF | 0.56 | 9 |
| SEQ ID NO: 81 | RVPSTSSAPTKTSATSVLYY | 0.87 | 17 |
| SEQ ID NO: 82 | ASAAPSSAPTALSATSVLYY | 0.84 | 19 |
| SEQ ID NO: 83 | TVPKPSSAPTQLRSVKVAKV | 1.11 | 12 |
| SEQ ID NO: 84 | KVGKASSVPQKLEPLPIVYY | 1.1 | 9 |
| SEQ ID NO: 85 | KASKASSVPQKLEPLPIVYY | 0.77 | 10 |
| SEQ ID NO: 86 | RNVQSRPVPTQLSPISVLYK | 1.42 | 24 |
| SEQ ID NO: 87 | KIPKASSVPTELSPISVLYK | 1.35 | 21 |
| SEQ ID NO: 88 | ASAAPSSVPQALRSVKVAKV | 1.27 | 18 |
| SEQ ID NO: 89 | VSQDLRSVKVAKV | 0.96 | 17 |
| SEQ ID NO: 90 | ASASPSSVPQDLRSVKVAKV | 1.42 | 9 |
| SEQ ID NO: 91 | NDEGLESVPTEERSVKVAKV | 1.45 | 12 |
| SEQ ID NO: 92 | TQVKMRPVQVRKI | 0.99 | 8 |
| SEQ ID NO: 93 | KIPKASSTPTELSPINMLYF | 1.13 | 7 |
| SEQ ID NO: 94 | GIPEPSSTPTKMSPINMLYF | 1.31 | 9 |
| SEQ ID NO: 95 | VPTGQSAISMLYL | 1.23 | 17 |
| SEQ ID NO: 96 | NDEGLESVPTEESAISMLYL | 0.96 | 22 |
| SEQ ID NO: 97 | SSVKSQPSRVHHSPISILFI | 0.79 | 14 |
| SEQ ID NO: 98 | RNVQSRPTQVQLSPISILFI | 0.79 | 17 |
| SEQ ID NO: 99 | YVPKPSSAPTKLNAISVLYF | 0.71 | 21 |
| SEQ ID NO: 100 | HVPKPSSAPTKLEPISILYL | 0.66 | 19 |

[1163] Likewise, using the method detailed in the description, the data summarized in Table 6 below demonstrate that pharmaceutical associations according to certain embodiments of the present disclosure containing GFR-binding peptides as disclosed herein in association with PET as already described herein:
[1164] for SEQ ID NO: 201 to 209, on MG63 cells;
[1165] for SEQ ID NO: 210 to 217, on human rhabdosarcoma cells;
[1166] for SEQ ID NO: 218 to 224, on mesenchymal chondrosarcoma cells; and
[1167] for SEQ ID NO: 225 to 238, on human adenocarcinoma cells;

[1168] induce the particularly efficient recoding (as shown via quantification of pRB et P53) of neoplastic cells (in these examples: MG63 cells, human rhabdosarcoma cells, mesenchymal chondrosarcoma cells, and human adenocarcinoma cells, as stated above) into healthy cells. It should also be noted that GFR-binding peptides having a RMSD value of 2.45 Å or less, are particularly advantageous and efficient in recoding cells:

TABLE 6

| | | RMSD | P53 | pRB |
|---|---|---|---|---|
| SEQ ID No | AA sequences | (Å) | (%) | (%) |
| SEQ ID NO: 201 | NDEGLESVPEDLSSLSVLFF | 1.92 | 29 | 12 |
| SEQ ID NO: 202 | RVPSTSSVPTGQSAISTLYL | 1.78 | 25 | 10 |
| SEQ ID NO: 203 | RVPSTSSAPTKMNAISMLYF | 1.5 | 31 | 9 |
| SEQ ID NO: 204 | GIPEPSSAPTELSATSILYY | 1.66 | 33 | 16 |
| SEQ ID NO: 205 | STPPTSSVPTELSPISTLYK | 1.71 | 41 | 20 |
| SEQ ID NO: 206 | GIPEPSSAPVDLKPLSTLYV | 1.53 | 32 | 12 |
| SEQ ID NO: 207 | AASKASSVPQEEEPLPMVYY | 1.54 | 24 | 17 |
| SEQ ID NO: 208 | KIPKASSVSQKMEPLTMLYY | 1.7 | 30 | 12 |
| SEQ ID NO: 209 | KIPKASSVPTGGSNITVQIM | 1.43 | 45 | 11 |
| SEQ ID NO: 210 | AASKASSSRVELRSVKIAKV | 1.23 | 42 | 22 |
| SEQ ID NO: 211 | KIPKASSTQVRLRPVQIRKI | 1.87 | 42 | 19 |
| SEQ ID NO: 212 | STPPTSSSRVQLSAISMLYL | 1.44 | 27 | 11 |
| SEQ ID NO: 213 | RVPSTSSTQVKMSAISMLYL | 0.97 | 26 | 12 |
| SEQ ID NO: 214 | GIPEPSSVSQEESSLSTLFF | 0.88 | 31 | 18 |
| SEQ ID NO: 215 | KIPKASSSRVRLSSLSTLFF | 1.32 | 30 | 19 |
| SEQ ID NO: 216 | AASKASSTPTDLNAISTLYF | 1.66 | 27 | 19 |
| SEQ ID NO: 217 | RVPSTSSTQVDLNAISVLYF | 1.84 | 24 | 18 |
| SEQ ID NO: 218 | GIPEPSSVSQELSATSMLYY | 1.49 | 28 | 17 |
| SEQ ID NO: 219 | KIPKASSTQVGQSATSILYY | 1.93 | 31 | 14 |
| SEQ ID NO: 220 | STPPTSSAPVGQSPISMLYI | 1.83 | 34 | 15 |
| SEQ ID NO: 221 | KIPKASSTPTRLSPISMLFI | 1.45 | 37 | 21 |
| SEQ ID NO: 222 | GIPEPSSAPTRLEPISMLYL | 1.56 | 36 | 8 |
| SEQ ID NO: 223 | KIPKASSVSQQLEPISTLYL | 1.57 | 29 | 9 |
| SEQ ID NO: 224 | STPPTSSVPTEVSPINTLYF | 1.78 | 26 | 13 |
| SEQ ID NO: 225 | AASKASSSRVKMSPINVLYF | 1.75 | 25 | 12 |
| SEQ ID NO: 226 | KIPKASSVPTKMKPLSVLYV | 1.68 | 31 | 16 |
| SEQ ID NO: 227 | RVPSTSSAPTKMKPLSMLYV | 1.48 | 32 | 14 |
| SEQ ID NO: 228 | STPPTSSVSQKMKPLSILYV | 1.46 | 26 | 18 |
| SEQ ID NO: 229 | KIPKASSVPAQLEPLPIVYY | 1.71 | 31 | 23 |
| SEQ ID NO: 230 | GIPEPSSAPVGQEPLPMVYY | 1.74 | 30 | 19 |
| SEQ ID NO: 231 | RVPSTSSVPEKMEPLTMLYY | 1.8 | 22 | 18 |
| SEQ ID NO: 232 | GIPEPSSAPVEEEPLTTLYY | 1.75 | 21 | 13 |
| SEQ ID NO: 233 | STPPTSSTPTKMSNITTQIM | 1.97 | 43 | 23 |
| SEQ ID NO: 234 | RVPSTSSVPAEESNITVQIM | 1.92 | 45 | 22 |
| SEQ ID NO: 235 | AASKASSVPQRLRSVKVAKV | 2.01 | 40 | 26 |
| SEQ ID NO: 236 | KIPKASSTQVRLRSVKTAKV | 2.04 | 37 | 25 |
| SEQ ID NO: 237 | AASKASSVPEKMRPVQTRKI | 2.14 | 42 | 22 |
| SEQ ID NO: 238 | GIPEPSSAPVDMRPVQIRKI | 2.17 | 40 | 23 |

### Example 16: The Presence of Adhesion Components in the Extracellular Microenvironment Inhibits Cell Conversion

[1169] In order to demonstrate the importance of adhesion proteins inhibition in the recoding process of a neoplastic cell, a PET substrate was covalently functionalized with RGD peptides (the primary integrin recognition site present in many ECM proteins (e.g., fibronectin)) and an exemplary GFR-binding compound according to the present disclosure using methods already described herein.

[1170] This modified substrate was then cultured with human osteosarcoma cells from ATCC® in Dulbecco's Modified Eagle Medium (DMEM, Invitrogen®) supplemented with 10% (v/v) fetal bovine serum (FBS), 1% penicillin/streptomycin and incubated in a humidified atmosphere containing 5% (v/v) CO₂ at 37° C. All cell culture experiments were performed without any serum in the medium for the first 8 hours of culture. All cells were used at a low passage number (≤passage 10), were subconfluently cultured and were seeded at 10 000 cells/cm² for the purpose of the experiments. As shown in FIGS. 12A and 12B, the presence of covalently immobilized components favorising the adhesion inhibited the process of recoding of the osteosarcoma cells into osteocytes as characterized by RT-PCR and cell morphology observation.

[1171] It was also confirmed that the presence of RGD peptides did not modify the density of covently grafted GFR-binding compounds. Indeed, it was observed that the GFR-binding compound density was stable (around 1.3 pmol/mm²) with or without RGD peptides (FIG. 12C).

[1172] It was also shown that the RGD peptides interacted specifically with integrin α3β1. Indeed, inhibition of α3β1, α5β3 and αvβ3 integrins (i.e., the three predominant receptor dimers involved in binding ECM molecules containing RGD motifs for the osteosarcoma cells) by specific antibodies, indicated that cells predominantly engaged α3β1 integrins to interact with the RGD-modified substrate on the basis of the observed decrease of osteosarcoma cells adhesion in response to anti-□α3β1 treatment (FIG. 12D). This was not observed when αvβ3 and α5β3 were blocked (FIG. 12E). For these antibody inhibition studies, cells were preincubated with 5 g/mL anti-α3β1 (clone JBS5), anti-αvβ1 (clone LM609) and anti-α5β3.

### Example 17: Integrin Engagement Inhibits Cell Conversion

[1173] Using the same setup as used in Example 16 (tumor cell and PET functionalized with RGD peptides and an exemplary GFR-binding compound), silencing of integrin α3 and integrin β1 expression using shRNA was shown to reduce integrin α3 and integrin β1 mRNA levels by 60-70% and 50-60% respectively and integrin α3 and integrin β1 proteins levels by 60-70% after 24h. It was then shown that both integrins α3 and β1 shRNAs modulated osteosarcoma adhesion and spreading on RGD-modified substrates (FIG. 13 A, B).

[1174] Without being bound to any specific theory, integrin α3β1 thus appears to be an important factor in the conservation of osteosarcomas tumourous profile and appears to play an important role in the recoding of osteosarcomas into osteocytes. Herein, α3β1 integrin engagement appears to be involved in the inhibition of osteocytic recoding but not in osteosarcoma induction. Indeed, it was observed, within the framework of this experiment, that spheroid-like structures of osteosarcomas became progressively predominant (FIG. 13C). These results seems to demonstrate that integrin engagement has the ability to influence the behavior of human osteosarcoma towards spheroid-like structures or towards osteocytes.

### Example 18: In Vivo Rat Study

### A. Osteosarcoma Model

[1175] The OSRGa rat osteosarcoma orthotopic xenograft model in immunodeficient mice is the model of choice for the present study. This model is indeed characterized by the development of osteosarcoma tumors presenting very high similarities with the human osteosarcoma tumors both with regards to the tumor temporal development as well as its biological characteristics. Just like the human osteosarcoma, the OSRGa model is characterized by tumor proliferation associated with pulmonary metastasis and excessive bone remodeling. Indeed, OSRGa tumor cells, which multiply in contact with bone, produce bone matrix and induce an increase in mature and immature bone (woven bone) formation as well as a malignant osteolysis. In addition, similar to human osteosarcoma, the OSRGa tumors are comprised of tumor osteoblasts presenting marked cytonuclear abnormalities and high number of mitoses. This model is also highly reproducible and induces local orthotopic tumor formation with a very high incidence.

[1176] The OSRGa cell line isolated from osteosarcoma rat tumor is well characterized for both its in vitro phenotype and tumor development ability in vivo. When injected in contact with the mouse tibia periosteum, these cells induce de local development of osteosarcoma tumor associated with pulmonary metastasis providing a highly reproducible model most for preclinical animal studies.

### B. Experimental Protocol

[1177] B.1. Orthotopic Xenograft Procedure

[1178] After 5 days of adaptation period, 3 to 4 weeks old female immunodeficient mice (Rj:NMRI-nude strain) were subjected to rat osteosarcoma OSRGa cells orthotopic xenograft. For establishing the osteosarcoma model, 2.10⁶ OSRGa cells as a 10 μL suspension were injected intramuscularly in contact with the right tibia of the nude mice, after scratching the periosteum. An analgesic administration was performed throughout the injection.

[1179] Osteosarcoma tumor development was observed in 100% of the OSRGa orthotopic xenografts of the present study. The tumor growth was assessed twice per week until a mean tumor volume of around 500 mm³ was reached 23 days after OSRGa cell injection. The mice were then randomly assigned to 8 different groups before compound administration.

[1180] B.2. Compound Administration

[1181] 24 days after OSRGa cell injection, a 10⁻³M 1:1 mixture of GFR-binding peptides (SEQ ID NO: 240 and 239) covalently bound to a ceramic gel was injected inside the tumor. The injected volume of 90 μl was chosen according to the mean tumor volume for an efficient distribution. SEQ ID NO: SEQ ID NO: 240 and 239 were each grafted (via covalent binding of a N-terminal cysteine using a procedure already described herein) on a ceramic gel. The control conditions include a “No administration” condition for which no compound injections were performed in the tumor as well as a non grafted ceramic gel implant (Control 1). Hereinafter the various experimental conditions, the results for which are detailed below:

| | | Type of | Reference or |
|---|---|---|---|
| Experimental conditions | Code | product | test product |
| No administration | No administration | None | Reference |
| Ceramic gel | Control 1 | Gel | Reference |
| Ceramic gel grafted with | Product | Gel | Test |
| SEQ ID NO: SEQ ID NO: | | | |
| 240 and 239 | | | |

[1182] Two experimental endpoints were tested in the present study for the 3 experimental conditions: 3 days (1 injection) and 25 days (4 injections) after the first compound administration injection. The experimenters were blinded to group assignment until the completion of the procedure, and again at the time of the results assessment analysis performed with various techniques.

[1183] B.3. Histopathological Analysis

[1184] For all the experimental conditions, the tumors were removed and paraffin embedded after which successive transverse sections were produced. A thorough histopathological analysis has been then performed on these sections in order to assess tissue and cellular structure and therefore tumor progression and tumor cell recoding with the following stainings:
[1185] Hematoxylin-Eosin (HE) staining to qualitatively analyze tissue morphology
[1186] Masson's Trichrome™ staining for distinguishing cells from surrounding connective tissue
[1187] Immunohistochemistry assays: E11 antigen, Sclerostin, DMP1, CD44

### C. Results

[1188] Osteosarcoma cell recoding was assessed by analysis of the cell transformation from tumor cell towards an osteocyte cell. The thorough histopathological analysis was carried out and permitted to determine a percentage of osteosarcoma cell recoding for the 3 experimental conditions and for the 2 endpoints of each condition via various parameters.

[1189] Regarding the first endpoint of the study (3 days, 1 injection), the following results have been obtained:

| | Recoding efficiency |
|---|---|
| Experimental conditions | (1 injection) |
| No administration | 1.2% |
| Ceramic gel | 1.7% |
| Ceramic gel grafted with SEQ ID NO: SEQ ID NO: | 32% |
| 240 and 239 | |

[1190] Regarding the second endpoint of the study (25 days, 4 injections), the following results have been obtained:

| | Recoding efficiency |
|---|---|
| Experimental conditions | (4 injections) |
| No administration | 0.8% |
| Ceramic gel | 2.6% |
| Ceramic gel grafted with SEQ ID NO: SEQ ID NO: | 82% |
| 240 and 239 | |

[1191] Almost no tumor osteosarcoma cell recoding towards osteocyte cells was observed for the two control conditions and for both of the experimental endpoints. Tumor cell progression was therefore not decreased. Tumor osteosarcoma cell recoding was observed for the test condition after 1 injection. It was particularly noted that efficiency of the cell recoding process was highly increased after 4 injections of the test condition.

### D. Conclusions

[1192] It was shown that efficient recoding of osteosarcoma cells in an osteosarcoma animal model presenting all of the characteristics of human osteosarcoma, was possible using representative GFR-binding compounds grafted covalently to a ceramic gel.

[1193] The pharmaceutical associations of the present disclosure have been shown to represent new therapeutic solutions for osteosarcoma with the unique ability to induce tumor cell transformation towards osteocytes, a healthy cell type, thereby blocking tumor progression and regenerating the affected tissue.

1-121. (canceled)

122. A method for treating or preventing a neoplastic disease, disorder, condition, pathology, or any symptoms thereof, comprising administering, to a subject in need thereof, an effective amount of a pharmaceutical association, said association comprising at least one growth factor receptor-binding compound, which activates at least one growth factor receptor of a neoplastic cell, and at least one bioactive carrier forming at least one covalent or non-covalent interaction with said at least one growth factor receptor-binding compound, and wherein said association reduces or suppresses, in the neoplastic cell, the gene expression of at least one cyclin D and/or reduces or suppresses the formation of at least one complex formed between said at least one cyclin D and at least one of cyclin dependent-kinase 4 or 6.

123. The method according to claim 122, comprising a step selected from the group consisting of:
reducing or suppressing the gene expression of cyclin D during phase G1 of the cell cycle of the neoplastic cell;
restoring a function of at least one impaired cell cycle checkpoint;
down-regulating the expression or activity of a GTPase;
converting a neoplastic cell into a non-neoplastic cell;
inducing the differentiation of a neoplastic cell;
inducing the quiescence of a neoplastic cell;
inhibiting cell division of a neoplastic cell;
inhibiting cell proliferation of a neoplastic cell;
promoting anti-mitogen activity in a neoplastic cell;
promoting tumor suppressor activity in a neoplastic cell;
promoting anti-oncogenic activity in a neoplastic cell; and
any combinations thereof.

124. The method according to claim 122, wherein said growth factor receptor-binding compound comprises a peptide with four amino acids PEP; and wherein PEP1 is selected from the group consisting of SAIS, SSLS, NAIS, SATS, SPIS, EPIS, SPIN, KPLS, EPLP, EPLT, SNIT, RSVK and RPVQ.

125. The method according to claim 124, wherein said growth factor receptor-binding compound comprises a peptide with eight amino acids PEP12; wherein PEP12 is a peptide of general formula PEP1-AA¹⁷-PEP11; wherein AA¹⁷ is selected from the group consisting of G, A, V, L, I, P, F, M, W, T and S; wherein PEP11 is a peptide with 3 amino acids of general formula AA¹⁸-AA¹⁹-AA²⁰; wherein AA¹⁸ is selected from the group consisting of L, V, Q, A and R; wherein AA¹⁹ is selected from the group consisting of F, W, H, Y, I and K; wherein AA²⁰ is selected from the group consisting of L, F, Y, K, I, V and M.

126. The method according to claim 125, wherein PEP11 is selected from the group consisting of LYL, LFF, LYF, LYY, LYK, LYI, LFI, LYV, VYY, QIM, AKV and RKI.

127. The method according to claim 126, wherein the pair PEP1:PEP11 is selected from the group consisting of SAIS:LYL, SSLS:LFF, NAIS:LYF, SATS:LYY, SPIS:LYK, SPIS:LYI, SPIS:LFI, EPIS:LYL, SPIN:LYF, KPLS:LYV, EPLP:VYY, EPLT:LYY, SNIT:QIM, RSVK:AKV and RPVQ:RKI.

128. The method according to claim 122, wherein said growth factor receptor-binding compound comprises at least one bioactive carrier-affinity-containing group, wherein said at least one bioactive carrier-affinity-containing group provides said growth factor receptor-binding compound with the ability to covalently or non-covalently interact with a bioactive carrier; wherein said bioactive carrier-affinity-containing group is a biomaterial affinity-containing group which is adapted for forming at least one covalent bond or one non-covalent bond with a biomaterial.

129. The method according to claim 122, wherein said growth factor receptor-binding compound is a peptide or a peptidomimetic.

130. The method according to claim 122, wherein said growth factor receptor-binding compound is a non-cyclic peptide with between 8 and 25 amino acids having growth factor receptor-binding capability or a non-cyclic peptidomimetic having growth factor receptor-binding capability, wherein said peptidomimetic has a molecular weight comprised between 600 and 4,000 Daltons and comprises between 8 and 25 amino acids.

131. The method according to claim 129, wherein the RMSD value of the structure coordinates of said peptide or peptidomimetic with respect to PEPREF is 2.45 Å (Angstroms) or less, and wherein PEPREF is

| | | | | | | | | |
|---|---|---|---|---|---|---|---|---|
| ATOM | 511 | N | LYS | A | 1 | −14.570 | 46.437 | 27.424 |
| ATOM | 512 | CA | LYS | A | 1 | −13.512 | 45.748 | 28.151 |
| ATOM | 513 | C | LYS | A | 1 | −13.655 | 44.259 | 27.884 |
| ATOM | 514 | O | LYS | A | 1 | −12.769 | 43.463 | 28.197 |
| ATOM | 515 | CB | LYS | A | 1 | −13.605 | 46.029 | 29.652 |
| ATOM | 516 | CG | LYS | A | 1 | −13.640 | 47.509 | 29.991 |
| ATOM | 517 | CD | LYS | A | 1 | −12.615 | 48.297 | 29.183 |
| ATOM | 518 | CE | LYS | A | 1 | −12.625 | 49.768 | 29.575 |
| ATOM | 519 | NZ | LYS | A | 1 | −13.994 | 50.369 | 29.497 |
| ATOM | 520 | N | ILE | A | 2 | −14.792 | 43.890 | 27.309 |
| ATOM | 521 | CA | ILE | A | 2 | −15.051 | 42.499 | 26.967 |
| ATOM | 522 | C | ILE | A | 2 | −14.911 | 42.370 | 25.444 |
| ATOM | 523 | O | ILE | A | 2 | −15.531 | 43.125 | 24.683 |
| ATOM | 524 | CB | ILE | A | 2 | −16.466 | 42.065 | 27.401 |
| ATOM | 525 | CG1 | ILE | A | 2 | −16.630 | 42.238 | 28.915 |
| ATOM | 526 | CG2 | ILE | A | 2 | −16.710 | 40.629 | 26.985 |
| ATOM | 527 | CD1 | ILE | A | 2 | −15.631 | 41.478 | 29.30 |
| ATOM | 528 | N | PRO | A | 3 | −14.085 | 41.411 | 24.989 |
| ATOM | 529 | CA | PRO | A | 3 | −13.789 | 41.109 | 23.588 |
| ATOM | 530 | C | PRO | A | 3 | −14.998 | 40.695 | 22.768 |
| ATOM | 531 | O | PRO | A | 3 | −15.969 | 40.164 | 23.305 |
| ATOM | 532 | CB | PRO | A | 3 | −12.785 | 39.968 | 23.688 |
| ATOM | 533 | CG | PRO | A | 3 | −12.156 | 40.166 | 25.007 |
| ATOM | 534 | CD | PRO | A | 3 | −13.330 | 40.506 | 25.867 |
| ATOM | 535 | N | LYS | A | 4 | −14.937 | 40.937 | 21.463 |
| ATOM | 536 | CA | LYS | A | 4 | −16.023 | 40.529 | 20.590 |
| ATOM | 537 | C | LYS | A | 4 | −15.886 | 39.015 | 20.391 |
| ATOM | 538 | O | LYS | A | 4 | −14.903 | 38.415 | 20.831 |
| ATOM | 539 | CB | LYS | A | 4 | −15.926 | 41.244 | 19.245 |
| ATOM | 540 | CG | LYS | A | 4 | −15.802 | 42.751 | 19.355 |
| ATOM | 541 | CD | LYS | A | 4 | −16.292 | 43.433 | 18.083 |
| ATOM | 542 | CE | LYS | A | 4 | −16.162 | 44.943 | 18.177 |
| ATOM | 543 | NZ | LYS | A | 4 | −16.825 | 45.628 | 17.019 |
| ATOM | 544 | N | ALA | A | 5 | −16.85 | 38.393 | 19.759 |
| ATOM | 545 | CA | ALA | A | 5 | −16.811 | 36.955 | 19.507 |
| ATOM | 546 | C | ALA | A | 5 | −15.772 | 36.771 | 18.416 |
| ATOM | 547 | O | ALA | A | 5 | −15.727 | 37.534 | 17.455 |
| ATOM | 548 | CB | ALA | A | 5 | −18.168 | 36.419 | 19.043 |
| ATOM | 549 | N | CYS | A | 6 | −14.935 | 35.756 | 18.562 |
| ATOM | 550 | CA | CYS | A | 6 | −13.887 | 35.518 | 17.584 |
| ATOM | 551 | C | CYS | A | 6 | −14.347 | 34.765 | 16.338 |
| ATOM | 552 | O | CYS | A | 6 | −15.327 | 34.018 | 16.368 |
| ATOM | 553 | CB | CYS | A | 6 | −12.743 | 34.768 | 18.241 |
| ATOM | 554 | SG | CYS | A | 6 | −11.198 | 34.959 | 17.353 |
| ATOM | 555 | N | CYS | A | 7 | −13.623 | 34.973 | 15.243 |
| ATOM | 556 | CA | CYS | A | 7 | −13.931 | 34.328 | 13.969 |
| ATOM | 557 | C | CYS | A | 7 | −13.091 | 33.071 | 13.798 |
| ATOM | 558 | O | CYS | A | 7 | −11.961 | 33.123 | 13.302 |
| ATOM | 559 | CB | CYS | A | 7 | −13.653 | 35.290 | 12.824 |
| ATOM | 560 | SG | CYS | A | 7 | −13.930 | 34.633 | 11.154 |
| ATOM | 561 | N | VAL | A | 8 | −13.654 | 31.941 | 14.209 |
| ATOM | 562 | CA | VAL | A | 8 | −12.949 | 30.684 | 14.110 |
| ATOM | 563 | C | VAL | A | 8 | −13.653 | 29.733 | 13.157 |
| ATOM | 564 | O | VAL | A | 8 | −14.759 | 30.016 | 12.687 |
| ATOM | 565 | CB | VAL | A | 8 | −12.814 | 30.038 | 15.492 |
| ATOM | 566 | CG1 | VAL | A | 8 | −11.807 | 30.825 | 16.337 |
| ATOM | 567 | CG2 | VAL | A | 8 | −14.161 | 30.006 | 16.170 |
| ATOM | 568 | N | PRO | A | 9 | −13.003 | 28.601 | 12.828 |
| ATOM | 569 | CA | PRO | A | 9 | −13.593 | 27.615 | 11.918 |
| ATOM | 570 | C | PRO | A | 9 | −14.726 | 26.886 | 12.631 |
| ATOM | 571 | O | PRO | A | 9 | −14.581 | 26.476 | 13.780 |
| ATOM | 572 | CB | PRO | A | 9 | −12.423 | 26.676 | 11.601 |
| ATOM | 573 | CG | PRO | A | 9 | −11.204 | 27.487 | 11.925 |
| ATOM | 574 | CD | PRO | A | 9 | −11.620 | 28.226 | 13.163 |
| ATOM | 575 | N | THR | A | 10 | −15.847 | 26.721 | 11.942 |
| ATOM | 576 | CA | THR | A | 10 | −16.999 | 26.060 | 12.527 |
| ATOM | 577 | C | THR | A | 10 | −17.334 | 24.767 | 11.804 |
| ATOM | 578 | O | THR | A | 10 | −18.097 | 23.943 | 12.303 |
| ATOM | 579 | CB | THR | A | 10 | −18.211 | 27.010 | 12.523 |
| ATOM | 580 | OG1 | THR | A | 10 | −18.491 | 27.445 | 11.185 |
| ATOM | 581 | CG2 | THR | A | 10 | −17.902 | 28.230 | 13.375 |
| ATOM | 582 | N | GLU | A | 11 | −16.750 | 24.586 | 10.627 |
| ATOM | 583 | CA | GLU | A | 11 | −16.980 | 23.377 | 9.848 |
| ATOM | 584 | C | GLU | A | 11 | −15.643 | 22.935 | 9.246 |
| ATOM | 585 | O | GLU | A | 11 | −15.029 | 23.666 | 8.464 |
| ATOM | 586 | CB | GLU | A | 11 | −17.981 | 23.624 | 8.715 |
| ATOM | 587 | CG | GLU | A | 11 | −19.421 | 23.807 | 9.163 |
| ATOM | 588 | CD | GLU | A | 11 | −19.686 | 25.166 | 9.770 |
| ATOM | 589 | OE1 | GLU | A | 11 | −19.478 | 26.175 | 9.073 |
| ATOM | 590 | OE2 | GLU | A | 11 | −20.111 | 25.227 | 10.939 |
| ATOM | 591 | N | LEU | A | 12 | −15.183 | 21.749 | 9.622 |
| ATOM | 592 | CA | LEU | A | 12 | −13.923 | 21.254 | 9.104 |
| ATOM | 593 | C | LEU | A | 12 | −14.062 | 19.912 | 8.386 |
| ATOM | 594 | O | LEU | A | 12 | −15.136 | 19.299 | 8.359 |
| ATOM | 595 | CB | LEU | A | 12 | −12.893 | 21.144 | 10.230 |
| ATOM | 596 | CG | LEU | A | 12 | −12.660 | 22.422 | 11.054 |
| ATOM | 597 | CD1 | LEU | A | 12 | −13.475 | 22.350 | 12.337 |
| ATOM | 598 | CD2 | LEU | A | 12 | −11.181 | 22.586 | 11.399 |
| ATOM | 599 | N | SER | A | 13 | −12.971 | 19.476 | 7.771 |
| ATOM | 600 | CA | SER | A | 13 | −12.964 | 18.218 | 7.046 |
| ATOM | 601 | C | SER | A | 13 | −11.568 | 17.628 | 7.164 |
| ATOM | 602 | O | SER | A | 13 | −10.613 | 18.320 | 7.550 |
| ATOM | 603 | CB | SER | A | 13 | −13.346 | 18.435 | 5.578 |
| ATOM | 604 | OG | SER | A | 13 | −12.404 | 19.261 | 4.923 |
| ATOM | 605 | N | ALA | A | 13 | −11.449 | 16.352 | 6.818 |
| ATOM | 606 | CA | ALA | A | 13 | −10.179 | 15.665 | 6.949 |
| ATOM | 607 | C | ALA | A | 13 | −9.421 | 15.471 | 5.652 |
| ATOM | 608 | O | ALA | A | 13 | −9.941 | 15.720 | 4.563 |
| ATOM | 609 | CB | ALA | A | 13 | −10.413 | 14.306 | 7.626 |
| ATOM | 610 | N | ILE | A | 14 | −8.171 | 15.046 | 5.783 |
| ATOM | 611 | CA | ILE | A | 14 | −7.343 | 14.746 | 4.623 |
| ATOM | 612 | C | ILE | A | 14 | −6.475 | 13.559 | 5.004 |
| ATOM | 613 | O | ILE | A | 14 | −6.212 | 13.316 | 6.183 |
| ATOM | 614 | CB | ILE | A | 14 | −6.401 | 15.916 | 4.183 |
| ATOM | 615 | CG1 | ILE | A | 14 | −5.284 | 16.106 | 5.200 |
| ATOM | 616 | CG2 | ILE | A | 14 | −7.188 | 17.211 | 3.982 |
| ATOM | 617 | CD1 | ILE | A | 14 | −4.173 | 16.973 | 4.696 |
| ATOM | 618 | N | SER | A | 15 | −6.045 | 12.806 | 3.999 |
| ATOM | 619 | CA | SER | A | 15 | −5.187 | 11.662 | 4.242 |
| ATOM | 620 | C | SER | A | 15 | −3.740 | 12.089 | 4.217 |
| ATOM | 621 | O | SER | A | 15 | −3.360 | 13.020 | 3.508 |
| ATOM | 622 | CB | SER | A | 15 | −5.416 | 10.584 | 3.185 |
| ATOM | 623 | OG | SER | A | 15 | −6.667 | 9.971 | 3.401 |
| ATOM | 624 | N | MET | A | 16 | −2.933 | 11.409 | 5.012 |
| ATOM | 625 | CA | MET | A | 16 | −1.518 | 11.700 | 5.047 |
| ATOM | 626 | C | MET | A | 16 | −0.778 | 10.414 | 5.244 |
| ATOM | 627 | O | MET | A | 16 | −1.137 | 9.594 | 6.078 |
| ATOM | 628 | CB | MET | A | 16 | −1.170 | 12.694 | 6.164 |
| ATOM | 629 | CG | MET | A | 16 | −1.848 | 14.042 | 5.974 |
| ATOM | 630 | SD | MET | A | 16 | −1.017 | 15.431 | 6.760 |
| ATOM | 631 | CE | MET | A | 16 | −0.799 | 14.823 | 8.475 |
| ATOM | 632 | N | LEU | A | 17 | 0.238 | 10.231 | 4.426 |
| ATOM | 633 | CA | LEU | A | 17 | 1.077 | 9.065 | 4.508 |
| ATOM | 634 | C | LEU | A | 17 | 2.289 | 9.610 | 5.264 |
| ATOM | 635 | O | LEU | A | 17 | 2.939 | 10.565 | 4.818 |
| ATOM | 636 | CB | LEU | A | 17 | 1.461 | 8.608 | 3.100 |
| ATOM | 637 | CG | LEU | A | 17 | 2.324 | 7.355 | 2.955 |
| ATOM | 638 | CD1 | LEU | A | 17 | 1.553 | 6.145 | 3.445 |
| ATOM | 639 | CD2 | LEU | A | 17 | 2.723 | 7.190 | 1.492 |
| ATOM | 640 | N | TYR | A | 18 | 2.581 | 9.029 | 6.418 |
| ATOM | 641 | CA | TYR | A | 18 | 3.706 | 9.501 | 7.196 |
| ATOM | 642 | C | TYR | A | 18 | 4.434 | 8.333 | 7.835 |
| ATOM | 643 | O | TYR | A | 18 | 4.081 | 7.186 | 7.603 |
| ATOM | 644 | CB | TYR | A | 18 | 3.222 | 10.458 | 8.281 |
| ATOM | 645 | CG | TYR | A | 18 | 2.386 | 9.782 | 9.346 |
| ATOM | 646 | CD1 | TYR | A | 18 | 1.029 | 9.527 | 9.147 |
| ATOM | 647 | CD2 | TYR | A | 18 | 2.961 | 9.379 | 10.550 |
| ATOM | 648 | CE1 | TYR | A | 18 | 0.273 | 8.894 | 10.128 |
| ATOM | 649 | CE2 | TYR | A | 18 | 2.218 | 8.745 | 11.526 |
| ATOM | 650 | CZ | TYR | A | 18 | 0.877 | 8.508 | 11.317 |
| ATOM | 651 | OH | TYR | A | 18 | 0.134 | 7.922 | 12.318 |
| ATOM | 652 | N | LEU | A | 19 | 5.439 | 8.651 | 8.650 |
| ATOM | 653 | CA | LEU | A | 19 | 6.255 | 7.661 | 9.347 |
| ATOM | 654 | C | LEU | A | 19 | 6.210 | 7.946 | 10.847 |
| ATOM | 655 | O | LEU | A | 19 | 6.685 | 8.992 | 11.288 |
| ATOM | 656 | CB | LEU | A | 19 | 7.701 | 7.763 | 8.871 |
| ATOM | 657 | CG | LEU | A | 19 | 7.901 | 7.850 | 7.359 |
| ATOM | 658 | CD1 | LEU | A | 19 | 9.300 | 8.379 | 7.039 |
| ATOM | 659 | CD2 | LEU | A | 19 | 7.669 | 6.482 | 6.748 |

132. The method according to claim 129, wherein said growth factor receptor-binding compound is a cyclic peptide with between 10 and 60 amino acids having a growth factor receptor-binding capability or a cyclic peptidomimetic comprising between 10 and 60 amino acids, having a growth factor receptor-binding capability.

133. The method according to claim 132, wherein said growth factor receptor-binding compound is a cyclic peptide or a cyclic peptidomimetic, having a molecular weight comprised between 1,000 and 7,000 Da.

134. The method according to claim 129, wherein said growth factor receptor-binding compound is selected from the group consisting of any one of peptides of SEQ ID NO: 1 to 13564.

135. The method according to claim 122, comprising at least one medically acceptable excipient, carrier or vehicle.

136. The method according to claim 124, wherein said growth factor receptor-binding compound comprises at least one bioactive carrier-affinity-containing group, wherein said at least one bioactive carrier-affinity-containing group provides said growth factor receptor-binding compound with the ability to covalently or non-covalently interact with a bioactive carrier; wherein said bioactive carrier-affinity-containing group is a biomaterial affinity-containing group which is adapted for forming at least one covalent bond or one non-covalent bond with a biomaterial.

137. The method according to claim 124, wherein said growth factor receptor-binding compound is a peptide or a peptidomimetic.

138. The method according to claim 127, wherein said growth factor receptor-binding compound is a peptide or a peptidomimetic.

139. The method according to claim 137, wherein said growth factor receptor-binding compound is a non-cyclic peptide with between 8 and 25 amino acids having growth factor receptor-binding capability or a non-cyclic peptidomimetic having growth factor receptor-binding capability, wherein said peptidomimetic has a molecular weight comprised between 600 and 4,000 Daltons and comprises between 8 and 25 amino acids.

140. The method according to claim 138, wherein said growth factor receptor-binding compound is a non-cyclic peptide with between 8 and 25 amino acids having growth factor receptor-binding capability or a non-cyclic peptidomimetic having growth factor receptor-binding capability, wherein said peptidomimetic has a molecular weight comprised between 600 and 4,000 Daltons and comprises between 8 and 25 amino acids.

141. The method according to claim 137, wherein the RMSD value of the structure coordinates of said peptide or peptidomimetic with respect to PEPREF is 2.45 Å (Angstroms) or less, and wherein PEPREF is

| | | | | | | | | |
|---|---|---|---|---|---|---|---|---|
| ATOM | 511 | N | LYS | A | 1 | −14.570 | 46.437 | 27.424 |
| ATOM | 512 | CA | LYS | A | 1 | −13.512 | 45.748 | 28.151 |
| ATOM | 513 | C | LYS | A | 1 | −13.655 | 44.259 | 27.884 |
| ATOM | 514 | O | LYS | A | 1 | −12.769 | 43.463 | 28.197 |
| ATOM | 515 | CB | LYS | A | 1 | −13.605 | 46.029 | 29.652 |
| ATOM | 516 | CG | LYS | A | 1 | −13.640 | 47.509 | 29.991 |
| ATOM | 517 | CD | LYS | A | 1 | −12.615 | 48.297 | 29.183 |
| ATOM | 518 | CE | LYS | A | 1 | −12.625 | 49.768 | 29.575 |
| ATOM | 519 | NZ | LYS | A | 1 | −13.994 | 50.369 | 29.497 |
| ATOM | 520 | N | ILE | A | 2 | −14.792 | 43.890 | 27.309 |
| ATOM | 521 | CA | ILE | A | 2 | −15.051 | 42.499 | 26.967 |
| ATOM | 522 | C | ILE | A | 2 | −14.911 | 42.370 | 25.444 |
| ATOM | 523 | O | ILE | A | 2 | −15.531 | 43.125 | 24.683 |
| ATOM | 524 | CB | ILE | A | 2 | −16.466 | 42.065 | 27.401 |
| ATOM | 525 | CG1 | ILE | A | 2 | −16.630 | 42.238 | 28.915 |
| ATOM | 526 | CG2 | ILE | A | 2 | −16.710 | 40.629 | 26.985 |
| ATOM | 527 | CD1 | ILE | A | 2 | −15.631 | 41.478 | 29.30 |
| ATOM | 528 | N | PRO | A | 3 | −14.085 | 41.411 | 24.989 |
| ATOM | 529 | CA | PRO | A | 3 | −13.789 | 41.109 | 23.588 |
| ATOM | 530 | C | PRO | A | 3 | −14.998 | 40.695 | 22.768 |
| ATOM | 531 | O | PRO | A | 3 | −15.969 | 40.164 | 23.305 |
| ATOM | 532 | CB | PRO | A | 3 | −12.785 | 39.968 | 23.688 |
| ATOM | 533 | CG | PRO | A | 3 | −12.156 | 40.166 | 25.007 |
| ATOM | 534 | CD | PRO | A | 3 | −13.330 | 40.506 | 25.867 |
| ATOM | 535 | N | LYS | A | 4 | −14.937 | 40.937 | 21.463 |
| ATOM | 536 | CA | LYS | A | 4 | −16.023 | 40.529 | 20.590 |
| ATOM | 537 | C | LYS | A | 4 | −15.886 | 39.015 | 20.391 |
| ATOM | 538 | O | LYS | A | 4 | −14.903 | 38.415 | 20.831 |
| ATOM | 539 | CB | LYS | A | 4 | −15.926 | 41.244 | 19.245 |
| ATOM | 540 | CG | LYS | A | 4 | −15.802 | 42.751 | 19.355 |
| ATOM | 541 | CD | LYS | A | 4 | −16.292 | 43.433 | 18.083 |
| ATOM | 542 | CE | LYS | A | 4 | −16.162 | 44.943 | 18.177 |
| ATOM | 543 | NZ | LYS | A | 4 | −16.825 | 45.628 | 17.019 |
| ATOM | 544 | N | ALA | A | 5 | −16.85 | 38.393 | 19.759 |
| ATOM | 545 | CA | ALA | A | 5 | −16.811 | 36.955 | 19.507 |
| ATOM | 546 | C | ALA | A | 5 | −15.772 | 36.771 | 18.416 |
| ATOM | 547 | O | ALA | A | 5 | −15.727 | 37.534 | 17.455 |
| ATOM | 548 | CB | ALA | A | 5 | −18.168 | 36.419 | 19.043 |
| ATOM | 549 | N | CYS | A | 6 | −14.935 | 35.756 | 18.562 |
| ATOM | 550 | CA | CYS | A | 6 | −13.887 | 35.518 | 17.584 |
| ATOM | 551 | C | CYS | A | 6 | −14.347 | 34.765 | 16.338 |
| ATOM | 552 | O | CYS | A | 6 | −15.327 | 34.018 | 16.368 |
| ATOM | 553 | CB | CYS | A | 6 | −12.743 | 34.768 | 18.241 |
| ATOM | 554 | SG | CYS | A | 6 | −11.198 | 34.959 | 17.353 |
| ATOM | 555 | N | CYS | A | 7 | −13.623 | 34.973 | 15.243 |
| ATOM | 556 | CA | CYS | A | 7 | −13.931 | 34.328 | 13.969 |
| ATOM | 557 | C | CYS | A | 7 | −13.091 | 33.071 | 13.798 |
| ATOM | 558 | O | CYS | A | 7 | −11.961 | 33.123 | 13.302 |
| ATOM | 559 | CB | CYS | A | 7 | −13.653 | 35.290 | 12.824 |
| ATOM | 560 | SG | CYS | A | 7 | −13.930 | 34.633 | 11.154 |
| ATOM | 561 | N | VAL | A | 8 | −13.654 | 31.941 | 14.209 |
| ATOM | 562 | CA | VAL | A | 8 | −12.949 | 30.684 | 14.110 |
| ATOM | 563 | C | VAL | A | 8 | −13.653 | 29.733 | 13.157 |
| ATOM | 564 | O | VAL | A | 8 | −14.759 | 30.016 | 12.687 |
| ATOM | 565 | CB | VAL | A | 8 | −12.814 | 30.038 | 15.492 |
| ATOM | 566 | CG1 | VAL | A | 8 | −11.807 | 30.825 | 16.337 |
| ATOM | 567 | CG2 | VAL | A | 8 | −14.161 | 30.006 | 16.170 |
| ATOM | 568 | N | PRO | A | 9 | −13.003 | 28.601 | 12.828 |
| ATOM | 569 | CA | PRO | A | 9 | −13.593 | 27.615 | 11.918 |
| ATOM | 570 | C | PRO | A | 9 | −14.726 | 26.886 | 12.631 |
| ATOM | 571 | O | PRO | A | 9 | −14.581 | 26.476 | 13.780 |
| ATOM | 572 | CB | PRO | A | 9 | −12.423 | 26.676 | 11.601 |
| ATOM | 573 | CG | PRO | A | 9 | −11.204 | 27.487 | 11.925 |
| ATOM | 574 | CD | PRO | A | 9 | −11.620 | 28.226 | 13.163 |
| ATOM | 575 | N | THR | A | 10 | −15.847 | 26.721 | 11.942 |
| ATOM | 576 | CA | THR | A | 10 | −16.999 | 26.060 | 12.527 |
| ATOM | 577 | C | THR | A | 10 | −17.334 | 24.767 | 11.804 |
| ATOM | 578 | O | THR | A | 10 | −18.097 | 23.943 | 12.303 |
| ATOM | 579 | CB | THR | A | 10 | −18.211 | 27.010 | 12.523 |
| ATOM | 580 | OG1 | THR | A | 10 | −18.491 | 27.445 | 11.185 |
| ATOM | 581 | CG2 | THR | A | 10 | −17.902 | 28.230 | 13.375 |
| ATOM | 582 | N | GLU | A | 11 | −16.750 | 24.586 | 10.627 |
| ATOM | 583 | CA | GLU | A | 11 | −16.980 | 23.377 | 9.848 |
| ATOM | 584 | C | GLU | A | 11 | −15.643 | 22.935 | 9.246 |
| ATOM | 585 | O | GLU | A | 11 | −15.029 | 23.666 | 8.464 |
| ATOM | 586 | CB | GLU | A | 11 | −17.981 | 23.624 | 8.715 |
| ATOM | 587 | CG | GLU | A | 11 | −19.421 | 23.807 | 9.163 |
| ATOM | 588 | CD | GLU | A | 11 | −19.686 | 25.166 | 9.770 |
| ATOM | 589 | OE1 | GLU | A | 11 | −19.478 | 26.175 | 9.073 |
| ATOM | 590 | OE2 | GLU | A | 11 | −20.111 | 25.227 | 10.939 |
| ATOM | 591 | N | LEU | A | 12 | −15.183 | 21.749 | 9.622 |
| ATOM | 592 | CA | LEU | A | 12 | −13.923 | 21.254 | 9.104 |
| ATOM | 593 | C | LEU | A | 12 | −14.062 | 19.912 | 8.386 |
| ATOM | 594 | O | LEU | A | 12 | −15.136 | 19.299 | 8.359 |
| ATOM | 595 | CB | LEU | A | 12 | −12.893 | 21.144 | 10.230 |
| ATOM | 596 | CG | LEU | A | 12 | −12.660 | 22.422 | 11.054 |
| ATOM | 597 | CD1 | LEU | A | 12 | −13.475 | 22.350 | 12.337 |
| ATOM | 598 | CD2 | LEU | A | 12 | −11.181 | 22.586 | 11.399 |
| ATOM | 599 | N | SER | A | 13 | −12.971 | 19.476 | 7.771 |
| ATOM | 600 | CA | SER | A | 13 | −12.964 | 18.218 | 7.046 |
| ATOM | 601 | C | SER | A | 13 | −11.568 | 17.628 | 7.164 |
| ATOM | 602 | O | SER | A | 13 | −10.613 | 18.320 | 7.550 |
| ATOM | 603 | CB | SER | A | 13 | −13.346 | 18.435 | 5.578 |
| ATOM | 604 | OG | SER | A | 13 | −12.404 | 19.261 | 4.923 |
| ATOM | 605 | N | ALA | A | 13 | −11.449 | 16.352 | 6.818 |
| ATOM | 606 | CA | ALA | A | 13 | −10.179 | 15.665 | 6.949 |
| ATOM | 607 | C | ALA | A | 13 | −9.421 | 15.471 | 5.652 |
| ATOM | 608 | O | ALA | A | 13 | −9.941 | 15.720 | 4.563 |
| ATOM | 609 | CB | ALA | A | 13 | −10.413 | 14.306 | 7.626 |
| ATOM | 610 | N | ILE | A | 14 | −8.171 | 15.046 | 5.783 |
| ATOM | 611 | CA | ILE | A | 14 | −7.343 | 14.746 | 4.623 |
| ATOM | 612 | C | ILE | A | 14 | −6.475 | 13.559 | 5.004 |
| ATOM | 613 | O | ILE | A | 14 | −6.212 | 13.316 | 6.183 |
| ATOM | 614 | CB | ILE | A | 14 | −6.401 | 15.916 | 4.183 |
| ATOM | 615 | CG1 | ILE | A | 14 | −5.284 | 16.106 | 5.200 |
| ATOM | 616 | CG2 | ILE | A | 14 | −7.188 | 17.211 | 3.982 |
| ATOM | 617 | CD1 | ILE | A | 14 | −4.173 | 16.973 | 4.696 |
| ATOM | 618 | N | SER | A | 15 | −6.045 | 12.806 | 3.999 |
| ATOM | 619 | CA | SER | A | 15 | −5.187 | 11.662 | 4.242 |
| ATOM | 620 | C | SER | A | 15 | −3.740 | 12.089 | 4.217 |
| ATOM | 621 | O | SER | A | 15 | −3.360 | 13.020 | 3.508 |
| ATOM | 622 | CB | SER | A | 15 | −5.416 | 10.584 | 3.185 |
| ATOM | 623 | OG | SER | A | 15 | −6.667 | 9.971 | 3.401 |
| ATOM | 624 | N | MET | A | 16 | −2.933 | 11.409 | 5.012 |
| ATOM | 625 | CA | MET | A | 16 | −1.518 | 11.700 | 5.047 |
| ATOM | 626 | C | MET | A | 16 | −0.778 | 10.414 | 5.244 |
| ATOM | 627 | O | MET | A | 16 | −1.137 | 9.594 | 6.078 |
| ATOM | 628 | CB | MET | A | 16 | −1.170 | 12.694 | 6.164 |
| ATOM | 629 | CG | MET | A | 16 | −1.848 | 14.042 | 5.974 |
| ATOM | 630 | SD | MET | A | 16 | −1.017 | 15.431 | 6.760 |
| ATOM | 631 | CE | MET | A | 16 | −0.799 | 14.823 | 8.475 |
| ATOM | 632 | N | LEU | A | 17 | 0.238 | 10.231 | 4.426 |
| ATOM | 633 | CA | LEU | A | 17 | 1.077 | 9.065 | 4.508 |
| ATOM | 634 | C | LEU | A | 17 | 2.289 | 9.610 | 5.264 |
| ATOM | 635 | O | LEU | A | 17 | 2.939 | 10.565 | 4.818 |
| ATOM | 636 | CB | LEU | A | 17 | 1.461 | 8.608 | 3.100 |
| ATOM | 637 | CG | LEU | A | 17 | 2.324 | 7.355 | 2.955 |
| ATOM | 638 | CD1 | LEU | A | 17 | 1.553 | 6.145 | 3.445 |
| ATOM | 639 | CD2 | LEU | A | 17 | 2.723 | 7.190 | 1.492 |
| ATOM | 640 | N | TYR | A | 18 | 2.581 | 9.029 | 6.418 |
| ATOM | 641 | CA | TYR | A | 18 | 3.706 | 9.501 | 7.196 |
| ATOM | 642 | C | TYR | A | 18 | 4.434 | 8.333 | 7.835 |
| ATOM | 643 | O | TYR | A | 18 | 4.081 | 7.186 | 7.603 |
| ATOM | 644 | CB | TYR | A | 18 | 3.222 | 10.458 | 8.281 |
| ATOM | 645 | CG | TYR | A | 18 | 2.386 | 9.782 | 9.346 |
| ATOM | 646 | CD1 | TYR | A | 18 | 1.029 | 9.527 | 9.147 |
| ATOM | 647 | CD2 | TYR | A | 18 | 2.961 | 9.379 | 10.550 |
| ATOM | 648 | CE1 | TYR | A | 18 | 0.273 | 8.894 | 10.128 |
| ATOM | 649 | CE2 | TYR | A | 18 | 2.218 | 8.745 | 11.526 |
| ATOM | 650 | CZ | TYR | A | 18 | 0.877 | 8.508 | 11.317 |
| ATOM | 651 | OH | TYR | A | 18 | 0.134 | 7.922 | 12.318 |
| ATOM | 652 | N | LEU | A | 19 | 5.439 | 8.651 | 8.650 |
| ATOM | 653 | CA | LEU | A | 19 | 6.255 | 7.661 | 9.347 |
| ATOM | 654 | C | LEU | A | 19 | 6.210 | 7.946 | 10.847 |
| ATOM | 655 | O | LEU | A | 19 | 6.685 | 8.992 | 11.288 |
| ATOM | 656 | CB | LEU | A | 19 | 7.701 | 7.763 | 8.871 |
| ATOM | 657 | CG | LEU | A | 19 | 7.901 | 7.850 | 7.359 |
| ATOM | 658 | CD1 | LEU | A | 19 | 9.300 | 8.379 | 7.039 |
| ATOM | 659 | CD2 | LEU | A | 19 | 7.669 | 6.482 | 6.748 |

142. The method according to claim 138, wherein the RMSD value of the structure coordinates of said peptide or peptidomimetic with respect to PEPREF is 2.45 Å (Angstroms) or less, and wherein PEPREF is

| | | | | | | | | |
|---|---|---|---|---|---|---|---|---|
| ATOM | 511 | N | LYS | A | 1 | −14.570 | 46.437 | 27.424 |
| ATOM | 512 | CA | LYS | A | 1 | −13.512 | 45.748 | 28.151 |
| ATOM | 513 | C | LYS | A | 1 | −13.655 | 44.259 | 27.884 |
| ATOM | 514 | O | LYS | A | 1 | −12.769 | 43.463 | 28.197 |
| ATOM | 515 | CB | LYS | A | 1 | −13.605 | 46.029 | 29.652 |
| ATOM | 516 | CG | LYS | A | 1 | −13.640 | 47.509 | 29.991 |
| ATOM | 517 | CD | LYS | A | 1 | −12.615 | 48.297 | 29.183 |
| ATOM | 518 | CE | LYS | A | 1 | −12.625 | 49.768 | 29.575 |
| ATOM | 519 | NZ | LYS | A | 1 | −13.994 | 50.369 | 29.497 |
| ATOM | 520 | N | ILE | A | 2 | −14.792 | 43.890 | 27.309 |
| ATOM | 521 | CA | ILE | A | 2 | −15.051 | 42.499 | 26.967 |
| ATOM | 522 | C | ILE | A | 2 | −14.911 | 42.370 | 25.444 |
| ATOM | 523 | O | ILE | A | 2 | −15.531 | 43.125 | 24.683 |
| ATOM | 524 | CB | ILE | A | 2 | −16.466 | 42.065 | 27.401 |
| ATOM | 525 | CG1 | ILE | A | 2 | −16.630 | 42.238 | 28.915 |
| ATOM | 526 | CG2 | ILE | A | 2 | −16.710 | 40.629 | 26.985 |
| ATOM | 527 | CD1 | ILE | A | 2 | −15.631 | 41.478 | 29.30 |
| ATOM | 528 | N | PRO | A | 3 | −14.085 | 41.411 | 24.989 |
| ATOM | 529 | CA | PRO | A | 3 | −13.789 | 41.109 | 23.588 |
| ATOM | 530 | C | PRO | A | 3 | −14.998 | 40.695 | 22.768 |
| ATOM | 531 | O | PRO | A | 3 | −15.969 | 40.164 | 23.305 |
| ATOM | 532 | CB | PRO | A | 3 | −12.785 | 39.968 | 23.688 |
| ATOM | 533 | CG | PRO | A | 3 | −12.156 | 40.166 | 25.007 |
| ATOM | 534 | CD | PRO | A | 3 | −13.330 | 40.506 | 25.867 |
| ATOM | 535 | N | LYS | A | 4 | −14.937 | 40.937 | 21.463 |
| ATOM | 536 | CA | LYS | A | 4 | −16.023 | 40.529 | 20.590 |
| ATOM | 537 | C | LYS | A | 4 | −15.886 | 39.015 | 20.391 |
| ATOM | 538 | O | LYS | A | 4 | −14.903 | 38.415 | 20.831 |
| ATOM | 539 | CB | LYS | A | 4 | −15.926 | 41.244 | 19.245 |
| ATOM | 540 | CG | LYS | A | 4 | −15.802 | 42.751 | 19.355 |
| ATOM | 541 | CD | LYS | A | 4 | −16.292 | 43.433 | 18.083 |
| ATOM | 542 | CE | LYS | A | 4 | −16.162 | 44.943 | 18.177 |
| ATOM | 543 | NZ | LYS | A | 4 | −16.825 | 45.628 | 17.019 |
| ATOM | 544 | N | ALA | A | 5 | −16.85 | 38.393 | 19.759 |
| ATOM | 545 | CA | ALA | A | 5 | −16.811 | 36.955 | 19.507 |
| ATOM | 546 | C | ALA | A | 5 | −15.772 | 36.771 | 18.416 |
| ATOM | 547 | O | ALA | A | 5 | −15.727 | 37.534 | 17.455 |
| ATOM | 548 | CB | ALA | A | 5 | −18.168 | 36.419 | 19.043 |
| ATOM | 549 | N | CYS | A | 6 | −14.935 | 35.756 | 18.562 |
| ATOM | 550 | CA | CYS | A | 6 | −13.887 | 35.518 | 17.584 |
| ATOM | 551 | C | CYS | A | 6 | −14.347 | 34.765 | 16.338 |
| ATOM | 552 | O | CYS | A | 6 | −15.327 | 34.018 | 16.368 |
| ATOM | 553 | CB | CYS | A | 6 | −12.743 | 34.768 | 18.241 |
| ATOM | 554 | SG | CYS | A | 6 | −11.198 | 34.959 | 17.353 |
| ATOM | 555 | N | CYS | A | 7 | −13.623 | 34.973 | 15.243 |
| ATOM | 556 | CA | CYS | A | 7 | −13.931 | 34.328 | 13.969 |
| ATOM | 557 | C | CYS | A | 7 | −13.091 | 33.071 | 13.798 |
| ATOM | 558 | O | CYS | A | 7 | −11.961 | 33.123 | 13.302 |
| ATOM | 559 | CB | CYS | A | 7 | −13.653 | 35.290 | 12.824 |
| ATOM | 560 | SG | CYS | A | 7 | −13.930 | 34.633 | 11.154 |
| ATOM | 561 | N | VAL | A | 8 | −13.654 | 31.941 | 14.209 |
| ATOM | 562 | CA | VAL | A | 8 | −12.949 | 30.684 | 14.110 |
| ATOM | 563 | C | VAL | A | 8 | −13.653 | 29.733 | 13.157 |
| ATOM | 564 | O | VAL | A | 8 | −14.759 | 30.016 | 12.687 |
| ATOM | 565 | CB | VAL | A | 8 | −12.814 | 30.038 | 15.492 |
| ATOM | 566 | CG1 | VAL | A | 8 | −11.807 | 30.825 | 16.337 |
| ATOM | 567 | CG2 | VAL | A | 8 | −14.161 | 30.006 | 16.170 |
| ATOM | 568 | N | PRO | A | 9 | −13.003 | 28.601 | 12.828 |
| ATOM | 569 | CA | PRO | A | 9 | −13.593 | 27.615 | 11.918 |
| ATOM | 570 | C | PRO | A | 9 | −14.726 | 26.886 | 12.631 |
| ATOM | 571 | O | PRO | A | 9 | −14.581 | 26.476 | 13.780 |
| ATOM | 572 | CB | PRO | A | 9 | −12.423 | 26.676 | 11.601 |
| ATOM | 573 | CG | PRO | A | 9 | −11.204 | 27.487 | 11.925 |
| ATOM | 574 | CD | PRO | A | 9 | −11.620 | 28.226 | 13.163 |
| ATOM | 575 | N | THR | A | 10 | −15.847 | 26.721 | 11.942 |
| ATOM | 576 | CA | THR | A | 10 | −16.999 | 26.060 | 12.527 |
| ATOM | 577 | C | THR | A | 10 | −17.334 | 24.767 | 11.804 |
| ATOM | 578 | O | THR | A | 10 | −18.097 | 23.943 | 12.303 |
| ATOM | 579 | CB | THR | A | 10 | −18.211 | 27.010 | 12.523 |
| ATOM | 580 | OG1 | THR | A | 10 | −18.491 | 27.445 | 11.185 |
| ATOM | 581 | CG2 | THR | A | 10 | −17.902 | 28.230 | 13.375 |
| ATOM | 582 | N | GLU | A | 11 | −16.750 | 24.586 | 10.627 |
| ATOM | 583 | CA | GLU | A | 11 | −16.980 | 23.377 | 9.848 |
| ATOM | 584 | C | GLU | A | 11 | −15.643 | 22.935 | 9.246 |
| ATOM | 585 | O | GLU | A | 11 | −15.029 | 23.666 | 8.464 |
| ATOM | 586 | CB | GLU | A | 11 | −17.981 | 23.624 | 8.715 |
| ATOM | 587 | CG | GLU | A | 11 | −19.421 | 23.807 | 9.163 |
| ATOM | 588 | CD | GLU | A | 11 | −19.686 | 25.166 | 9.770 |
| ATOM | 589 | OE1 | GLU | A | 11 | −19.478 | 26.175 | 9.073 |
| ATOM | 590 | OE2 | GLU | A | 11 | −20.111 | 25.227 | 10.939 |
| ATOM | 591 | N | LEU | A | 12 | −15.183 | 21.749 | 9.622 |
| ATOM | 592 | CA | LEU | A | 12 | −13.923 | 21.254 | 9.104 |
| ATOM | 593 | C | LEU | A | 12 | −14.062 | 19.912 | 8.386 |
| ATOM | 594 | O | LEU | A | 12 | −15.136 | 19.299 | 8.359 |
| ATOM | 595 | CB | LEU | A | 12 | −12.893 | 21.144 | 10.230 |
| ATOM | 596 | CG | LEU | A | 12 | −12.660 | 22.422 | 11.054 |
| ATOM | 597 | CD1 | LEU | A | 12 | −13.475 | 22.350 | 12.337 |
| ATOM | 598 | CD2 | LEU | A | 12 | −11.181 | 22.586 | 11.399 |
| ATOM | 599 | N | SER | A | 13 | −12.971 | 19.476 | 7.771 |
| ATOM | 600 | CA | SER | A | 13 | −12.964 | 18.218 | 7.046 |
| ATOM | 601 | C | SER | A | 13 | −11.568 | 17.628 | 7.164 |
| ATOM | 602 | O | SER | A | 13 | −10.613 | 18.320 | 7.550 |
| ATOM | 603 | CB | SER | A | 13 | −13.346 | 18.435 | 5.578 |
| ATOM | 604 | OG | SER | A | 13 | −12.404 | 19.261 | 4.923 |
| ATOM | 605 | N | ALA | A | 13 | −11.449 | 16.352 | 6.818 |
| ATOM | 606 | CA | ALA | A | 13 | −10.179 | 15.665 | 6.949 |
| ATOM | 607 | C | ALA | A | 13 | −9.421 | 15.471 | 5.652 |
| ATOM | 608 | O | ALA | A | 13 | −9.941 | 15.720 | 4.563 |
| ATOM | 609 | CB | ALA | A | 13 | −10.413 | 14.306 | 7.626 |
| ATOM | 610 | N | ILE | A | 14 | −8.171 | 15.046 | 5.783 |
| ATOM | 611 | CA | ILE | A | 14 | −7.343 | 14.746 | 4.623 |
| ATOM | 612 | C | ILE | A | 14 | −6.475 | 13.559 | 5.004 |
| ATOM | 613 | O | ILE | A | 14 | −6.212 | 13.316 | 6.183 |
| ATOM | 614 | CB | ILE | A | 14 | −6.401 | 15.916 | 4.183 |
| ATOM | 615 | CG1 | ILE | A | 14 | −5.284 | 16.106 | 5.200 |
| ATOM | 616 | CG2 | ILE | A | 14 | −7.188 | 17.211 | 3.982 |
| ATOM | 617 | CD1 | ILE | A | 14 | −4.173 | 16.973 | 4.696 |
| ATOM | 618 | N | SER | A | 15 | −6.045 | 12.806 | 3.999 |
| ATOM | 619 | CA | SER | A | 15 | −5.187 | 11.662 | 4.242 |
| ATOM | 620 | C | SER | A | 15 | −3.740 | 12.089 | 4.217 |
| ATOM | 621 | O | SER | A | 15 | −3.360 | 13.020 | 3.508 |
| ATOM | 622 | CB | SER | A | 15 | −5.416 | 10.584 | 3.185 |
| ATOM | 623 | OG | SER | A | 15 | −6.667 | 9.971 | 3.401 |
| ATOM | 624 | N | MET | A | 16 | −2.933 | 11.409 | 5.012 |
| ATOM | 625 | CA | MET | A | 16 | −1.518 | 11.700 | 5.047 |
| ATOM | 626 | C | MET | A | 16 | −0.778 | 10.414 | 5.244 |
| ATOM | 627 | O | MET | A | 16 | −1.137 | 9.594 | 6.078 |
| ATOM | 628 | CB | MET | A | 16 | −1.170 | 12.694 | 6.164 |
| ATOM | 629 | CG | MET | A | 16 | −1.848 | 14.042 | 5.974 |
| ATOM | 630 | SD | MET | A | 16 | −1.017 | 15.431 | 6.760 |
| ATOM | 631 | CE | MET | A | 16 | −0.799 | 14.823 | 8.475 |
| ATOM | 632 | N | LEU | A | 17 | 0.238 | 10.231 | 4.426 |
| ATOM | 633 | CA | LEU | A | 17 | 1.077 | 9.065 | 4.508 |
| ATOM | 634 | C | LEU | A | 17 | 2.289 | 9.610 | 5.264 |
| ATOM | 635 | O | LEU | A | 17 | 2.939 | 10.565 | 4.818 |
| ATOM | 636 | CB | LEU | A | 17 | 1.461 | 8.608 | 3.100 |
| ATOM | 637 | CG | LEU | A | 17 | 2.324 | 7.355 | 2.955 |
| ATOM | 638 | CD1 | LEU | A | 17 | 1.553 | 6.145 | 3.445 |
| ATOM | 639 | CD2 | LEU | A | 17 | 2.723 | 7.190 | 1.492 |
| ATOM | 640 | N | TYR | A | 18 | 2.581 | 9.029 | 6.418 |
| ATOM | 641 | CA | TYR | A | 18 | 3.706 | 9.501 | 7.196 |
| ATOM | 642 | C | TYR | A | 18 | 4.434 | 8.333 | 7.835 |
| ATOM | 643 | O | TYR | A | 18 | 4.081 | 7.186 | 7.603 |
| ATOM | 644 | CB | TYR | A | 18 | 3.222 | 10.458 | 8.281 |
| ATOM | 645 | CG | TYR | A | 18 | 2.386 | 9.782 | 9.346 |
| ATOM | 646 | CD1 | TYR | A | 18 | 1.029 | 9.527 | 9.147 |
| ATOM | 647 | CD2 | TYR | A | 18 | 2.961 | 9.379 | 10.550 |
| ATOM | 648 | CE1 | TYR | A | 18 | 0.273 | 8.894 | 10.128 |
| ATOM | 649 | CE2 | TYR | A | 18 | 2.218 | 8.745 | 11.526 |
| ATOM | 650 | CZ | TYR | A | 18 | 0.877 | 8.508 | 11.317 |
| ATOM | 651 | OH | TYR | A | 18 | 0.134 | 7.922 | 12.318 |
| ATOM | 652 | N | LEU | A | 19 | 5.439 | 8.651 | 8.650 |
| ATOM | 653 | CA | LEU | A | 19 | 6.255 | 7.661 | 9.347 |
| ATOM | 654 | C | LEU | A | 19 | 6.210 | 7.946 | 10.847 |
| ATOM | 655 | O | LEU | A | 19 | 6.685 | 8.992 | 11.288 |
| ATOM | 656 | CB | LEU | A | 19 | 7.701 | 7.763 | 8.871 |
| ATOM | 657 | CG | LEU | A | 19 | 7.901 | 7.850 | 7.359 |
| ATOM | 658 | CD1 | LEU | A | 19 | 9.300 | 8.379 | 7.039 |
| ATOM | 659 | CD2 | LEU | A | 19 | 7.669 | 6.482 | 6.748 |

143. The method according to claim 122, wherein said method does not induce the death of said neoplastic cell.

144. The method according to claim 137, wherein said method does not induce the death of said neoplastic cell.

145. A method of converting a neoplastic cell into a non-neoplastic cell, said method comprising the administration to a cell, in-vitro, ex-vivo or in-vivo, of an effective amount of a pharmaceutical association;
wherein said association comprising at least one growth factor receptor-binding compound, which activates at least one growth factor receptor of a neoplastic cell, and at least one bioactive carrier forming at least one covalent or non-covalent interaction with said at least one growth factor receptor-binding compound; and
wherein said association reduces or suppresses, in the neoplastic cell, the gene expression of at least one cyclin D and/or reduces or suppresses the formation of at least one complex formed between said at least one cyclin D and at least one of cyclin dependent-kinase 4 or 6.

146. A method of inducing the formation of a physiologically functional and healthy cell selected from the group consisting of the bone, cartilage, vascular, blood, fibroblast, muscle, neural, epithelial, renal, and retinal cell lineage from a neoplastic cell, comprising administering to a subject in need thereof an effective amount of a pharmaceutical association;
wherein said association comprising at least one growth factor receptor-binding compound, which activates at least one growth factor receptor of a neoplastic cell, and at least one bioactive carrier forming at least one covalent or non-covalent interaction with said at least one growth factor receptor-binding compound; and
wherein said association reduces or suppresses, in the neoplastic cell, the gene expression of at least one cyclin D and/or reduces or suppresses the formation of at least one complex formed between said at least one cyclin D and at least one of cyclin dependent-kinase 4 or 6.

147. A method of determining the effectiveness of a pharmaceutical association for converting a neoplastic cell into a non-neoplastic cell, or for treating a neoplastic disease or at least one symptom thereof, comprising:
the administration of said pharmaceutical association to a cell;
the measurement of the expression of specific differentiation and/or cancerous markers;
the comparison of the expression of said specific differentiation and/or cancerous markers in the cell to the expression of said specific differentiation and/or cancerous markers in a cell treated with a control; and
determining the effectiveness of the pharmaceutical association relative to the control;
wherein said association comprising at least one growth factor receptor-binding compound, which activates at least one growth factor receptor of a neoplastic cell, and at least one bioactive carrier forming at least one covalent or non-covalent interaction with said at least one growth factor receptor-binding compound; and
wherein said association reduces or suppresses, in the neoplastic cell, the gene expression of at least one cyclin D and/or reduces or suppresses the formation of at least one complex formed between said at least one cyclin D and at least one of cyclin dependent-kinase 4 or 6.

148. A method for treating or preventing a neoplastic disease, disorder, condition, pathology, or any symptoms thereof, comprising administering, to a subject in need thereof, an effective amount of a pharmaceutical association;
wherein said association comprises at least one growth factor receptor-binding compound, which activates at least one growth factor receptor of a neoplastic cell, and at least one bioactive carrier forming at least one covalent or non-covalent interaction with said at least one growth factor receptor-binding compound;
wherein said growth factor receptor-binding compound is a peptide or a peptidomimetic;
wherein said growth factor receptor-binding compound comprises a peptide with four amino acids PEP1, and a peptide with five amino acids PEP2;
wherein PEP1 is selected from the group consisting of SAIS, SSLS, NAIS, SATS, SPIS, EPIS, SPIN, KPLS, EPLP, EPLT, SNIT, RSVK and RPVQ;
wherein PEP2 is selected from the group consisting of LKNYQ, LKVYP, LKKYR, LRKHR, LKYHY, KFKYE, YGKIP, YKQYE, DHHKD, EQLSN, IGEMS, LGEMS, KEVQV and KKATV; and
wherein said association reduces or suppresses, in the neoplastic cell, the gene expression of at least one cyclin D and/or reduces or suppresses the formation of at least one complex formed between said at least one cyclin D and at least one of cyclin dependent-kinase 4 or 6.

The application's sequence listing, which the Patent Office published only in electronic form, follows.

SEQUENCE LISTING (13615 sequences)

SEQ ID NO: 1 - protein, 20 aa, Artificial Sequence
  Non-cyclic GFR-binding peptide
RNVQSRPVPTQLSPISILYL

SEQ ID NO: 2 - protein, 20 aa, Artificial Sequence
  Non-cyclic GFR-binding peptide
YVPKPSSAPTKLNAISTLYF

SEQ ID NO: 3 - protein, 20 aa, Artificial Sequence
  Non-cyclic GFR-binding peptide
RVPSTSSVPTKTSAISMLYL

SEQ ID NO: 4 - protein, 20 aa, Artificial Sequence
  Non-cyclic GFR-binding peptide
HVPKPSSAPTKLEPISILYL

SEQ ID NO: 5 - protein, 20 aa, Artificial Sequence
  Non-cyclic GFR-binding peptide
HVTKPTSVPEKLSSLSILFF

SEQ ID NO: 6 - protein, 20 aa, Artificial Sequence
  Non-cyclic GFR-binding peptide
KVGKASSVSQKLEPLTILYY

SEQ ID NO: 7 - protein, 20 aa, Artificial Sequence
  Non-cyclic GFR-binding peptide
RNVQSRPTVPTLNAISVLYF

SEQ ID NO: 8 - protein, 20 aa, Artificial Sequence
  Non-cyclic GFR-binding peptide
HVPKPSSAPTKLSAISTLYL

SEQ ID NO: 9 - protein, 20 aa, Artificial Sequence
  Non-cyclic GFR-binding peptide
AVPKASSAPTKLSAISMLYL

SEQ ID NO: 10 - protein, 20 aa, Artificial Sequence
  Non-cyclic GFR-binding peptide
KVGKASSVPTKLSAISTLYL

SEQ ID NO: 11 - protein, 18 aa, Artificial Sequence
  Non-cyclic GFR-binding peptide
PKPSSAPTQLNAISMLYF

SEQ ID NO: 12 - protein, 20 aa, Artificial Sequence
  Non-cyclic GFR-binding peptide
KVPKASSVPTELSAISTLYL

SEQ ID NO: 13 - protein, 20 aa, Artificial Sequence
  Non-cyclic GFR-binding peptide
KVPKPSSAPTQLSAISTLYL

SEQ ID NO: 14 - protein, 20 aa, Artificial Sequence
  Non-cyclic GFR-binding peptide
KVGKASSVPTKLSAISTLYL

SEQ ID NO: 15 - protein, 20 aa, Artificial Sequence
  Non-cyclic GFR-binding peptide
TVPKPSSAPTQLSAISMLYL

SEQ ID NO: 16 - protein, 20 aa, Artificial Sequence
  Non-cyclic GFR-binding peptide
AVPKASSAPTKLSAISTLYL

SEQ ID NO: 17 - protein, 20 aa, Artificial Sequence
  Non-cyclic GFR-binding peptide
KVGKASSVPTKLSAISMLYL

SEQ ID NO: 18 - protein, 20 aa, Artificial Sequence
  Non-cyclic GFR-binding peptide
GGGKASSVPTKLSAISTLYL

SEQ ID NO: 19 - protein, 21 aa, Artificial Sequence
  Non-cyclic GFR-binding peptide
RKIPKAGGVPTELSAISTLYL

SEQ ID NO: 20 - protein, 20 aa, Artificial Sequence
  Non-cyclic GFR-binding peptide
SSVKSQPSRVHHKPLSMLYV

SEQ ID NO: 21 - protein, 21 aa, Artificial Sequence
  Non-cyclic GFR-binding peptide
RKIPKASSVPTELSAISMLYL

SEQ ID NO: 22 - protein, 20 aa, Artificial Sequence
  Non-cyclic GFR-binding peptide
RNVQSRPTQVQLKPLSMLYV

SEQ ID NO: 23 - protein, 20 aa, Artificial Sequence
  Non-cyclic GFR-binding peptide
KIPKASSVPQELEPLPIVYY

SEQ ID NO: 24 - protein, 20 aa, Artificial Sequence
  Non-cyclic GFR-binding peptide
AAPASSSVPARLSPISILYI

SEQ ID NO: 25 - protein, 20 aa, Artificial Sequence
  Non-cyclic GFR-binding peptide
GIPEPSSVPEKMSPISILYI

SEQ ID NO: 26 - protein, 20 aa, Artificial Sequence
  Non-cyclic GFR-binding peptide
AAPASSSVPARLSPISLLYI

SEQ ID NO: 27 - protein, 20 aa, Artificial Sequence
  Non-cyclic GFR-binding peptide
KVPKASSAPTKLEPLPMVYY

SEQ ID NO: 28 - protein, 20 aa, Artificial Sequence
  Non-cyclic GFR-binding peptide
KIPKASSVSQQLEPLTILYY

SEQ ID NO: 29 - protein, 20 aa, Artificial Sequence
  Non-cyclic GFR-binding peptide
KIPEPSSVPTKMEPLPTVYY

SEQ ID NO: 30 - protein, 20 aa, Artificial Sequence
  Non-cyclic GFR-binding peptide
KIPKASSVPTELEPLPIVYY

SEQ ID NO: 31 - protein, 20 aa, Artificial Sequence
  Non-cyclic GFR-binding peptide
KVGKASSVPTKLEPLTILYY

SEQ ID NO: 32 - protein, 20 aa, Artificial Sequence
  Non-cyclic GFR-binding peptide
KIPEPSSVPQKMEPLPIVYY

SEQ ID NO: 33 - protein, 20 aa, Artificial Sequence
  Non-cyclic GFR-binding peptide
KIPKASSVPTELEPLPIVYY

SEQ ID NO: 34 - protein, 20 aa, Artificial Sequence
  Non-cyclic GFR-binding peptide
ASAAPSSVPQALEPLPIVYY

SEQ ID NO: 35 - protein, 20 aa, Artificial Sequence
  Non-cyclic GFR-binding peptide
KIPKASSVPTELEPLPIVYY

SEQ ID NO: 36 - protein, 20 aa, Artificial Sequence
  Non-cyclic GFR-binding peptide
ASAAPSSVPTALEPLTILYY

SEQ ID NO: 37 - protein, 20 aa, Artificial Sequence
  Non-cyclic GFR-binding peptide
KIPKAAAVPTELEPLPIVYY

SEQ ID NO: 38 - protein, 20 aa, Artificial Sequence
  Non-cyclic GFR-binding peptide
ASAAPSSVPQALEPLPILYL

SEQ ID NO: 39 - protein, 20 aa, Artificial Sequence
  Non-cyclic GFR-binding peptide
KIPKASSVPTELEPLPILYF

SEQ ID NO: 40 - protein, 20 aa, Artificial Sequence
  Non-cyclic GFR-binding peptide
ASAAPSSVPQALEPLPILYK

SEQ ID NO: 41 - protein, 20 aa, Artificial Sequence
  Non-cyclic GFR-binding peptide
ASAAPSSVPQALRSVKVAKV

SEQ ID NO: 42 - protein, 20 aa, Artificial Sequence
  Non-cyclic GFR-binding peptide
AGGGLRVVSQDLRSMKTAKV

SEQ ID NO: 43 - protein, 20 aa, Artificial Sequence
  Non-cyclic GFR-binding peptide
ASAAPSSVPQALRPMQVRKI

SEQ ID NO: 44 - protein, 20 aa, Artificial Sequence
  Non-cyclic GFR-binding peptide
NDEGLESVPTEERSVKMAKV

SEQ ID NO: 45 - protein, 20 aa, Artificial Sequence
  Non-cyclic GFR-binding peptide
ASASPSSTQVDLRPTQVRKI

SEQ ID NO: 46 - protein, 18 aa, Artificial Sequence
  Non-cyclic GFR-binding peptide
GTPGPAPTKLSAISMLYL

SEQ ID NO: 47 - protein, 20 aa, Artificial Sequence
  Non-cyclic GFR-binding peptide
KVGKASSMPTKLNAISTLYF

SEQ ID NO: 48 - protein, 20 aa, Artificial Sequence
  Non-cyclic GFR-binding peptide
NDEGLESVPTEESNITMQIM

SEQ ID NO: 49 - protein, 20 aa, Artificial Sequence
  Non-cyclic GFR-binding peptide
TVPKPSSAPTQLSPISILYI

SEQ ID NO: 50 - protein, 20 aa, Artificial Sequence
  Non-cyclic GFR-binding peptide
ASASPSSVPQDLEPLTILYY

SEQ ID NO: 51 - protein, 22 aa, Artificial Sequence
  Non-cyclic GFR-binding peptide
GTPGPKASSVPTELSPISTLYK

SEQ ID NO: 52 - protein, 22 aa, Artificial Sequence
  Non-cyclic GFR-binding peptide
GTPGPKASSVPTELSPISTLYK

SEQ ID NO: 53 - protein, 23 aa, Artificial Sequence
  Non-cyclic GFR-binding peptide
GTPGPPKPSSAPTQLNAISMLYF

SEQ ID NO: 54 - protein, 22 aa, Artificial Sequence
  Non-cyclic GFR-binding peptide
WWFWGKASSVPTELSPISTLYK

SEQ ID NO: 55 - protein, 20 aa, Artificial Sequence
  Non-cyclic GFR-binding peptide
NDEGLESVPTEESNITMQIM

SEQ ID NO: 56 - protein, 8 aa, Artificial Sequence
  Non-cyclic GFR-binding peptide
SPINMLYF

SEQ ID NO: 57 - protein, 13 aa, Artificial Sequence
  Non-cyclic GFR-binding peptide
TPTKMSPINMLYF

SEQ ID NO: 58 - protein, 10 aa, Artificial Sequence
  Non-cyclic GFR-binding peptide
KLSAISTLYL

SEQ ID NO: 59 - protein, 10 aa, Artificial Sequence
  Non-cyclic GFR-binding peptide
KLSAISTLYL

SEQ ID NO: 60 - protein, 20 aa, Artificial Sequence
  Non-cyclic GFR-binding peptide
AVPKASSVPTKLSNITMQIM

SEQ ID NO: 61 - protein, 20 aa, Artificial Sequence
  Non-cyclic GFR-binding peptide
YVPKPSSAPTKLNAISMLYF

SEQ ID NO: 62 - protein, 20 aa, Artificial Sequence
  Non-cyclic GFR-binding peptide
KVPSTSSVPTKTSAISMLYL

SEQ ID NO: 63 - protein, 20 aa, Artificial Sequence
  Non-cyclic GFR-binding peptide
KVPKPSSAPTKLEPISMLYL

SEQ ID NO: 64 - protein, 20 aa, Artificial Sequence
  Non-cyclic GFR-binding peptide
SIPKASSTPTELSPINMLYF

SEQ ID NO: 65 - protein, 18 aa, Artificial Sequence
  Non-cyclic GFR-binding peptide
TKPTSTPTKLSPINMLYF

SEQ ID NO: 66 - protein, 20 aa, Artificial Sequence
  Non-cyclic GFR-binding peptide
YVPKPSSTPTKLSPINMLYF

SEQ ID NO: 67 - protein, 20 aa, Artificial Sequence
  Non-cyclic GFR-binding peptide
ASAAPSSVPQALSSLSILFF

SEQ ID NO: 68 - protein, 20 aa, Artificial Sequence
  Non-cyclic GFR-binding peptide
ASASPSSVSQDLSSLSILFF

SEQ ID NO: 69 - protein, 20 aa, Artificial Sequence
  Non-cyclic GFR-binding peptide
VVPKPSSAPTQLEPISILYL

SEQ ID NO: 70 - protein, 20 aa, Artificial Sequence
  Non-cyclic GFR-binding peptide
AVPKASSAPTKLEPISILYL

SEQ ID NO: 71 - protein, 20 aa, Artificial Sequence
  Non-cyclic GFR-binding peptide
KVGKASSVPTKLEPISILYL

SEQ ID NO: 72 - protein, 20 aa, Artificial Sequence
  Non-cyclic GFR-binding peptide
SSVKSQPSRVHHKPLSMLYV

SEQ ID NO: 73 - protein, 20 aa, Artificial Sequence
  Non-cyclic GFR-binding peptide
RNVQSRPTQVQLKPLSMLYV

SEQ ID NO: 74 - protein, 20 aa, Artificial Sequence
  Non-cyclic GFR-binding peptide
KIPKASSVPQELEPLPIVYY

SEQ ID NO: 75 - protein, 20 aa, Artificial Sequence
  Non-cyclic GFR-binding peptide
GIPEPSSVPQKMEPLPIVYY

SEQ ID NO: 76 - protein, 20 aa, Artificial Sequence
  Non-cyclic GFR-binding peptide
SIPKASSVPQELEPLPIVYY

SEQ ID NO: 77 - protein, 20 aa, Artificial Sequence
  Non-cyclic GFR-binding peptide
ASAAPSSVPQALEPLTILYY

SEQ ID NO: 78 - protein, 20 aa, Artificial Sequence
  Non-cyclic GFR-binding peptide
ASASPSSVSQDLEPLTILYY

SEQ ID NO: 79 - protein, 20 aa, Artificial Sequence
  Non-cyclic GFR-binding peptide
NDEGLESVPTEEEPLTILYY

SEQ ID NO: 80 - protein, 20 aa, Artificial Sequence
  Non-cyclic GFR-binding peptide
NDEGLESVPTEESSLSILFF

SEQ ID NO: 81 - protein, 20 aa, Artificial Sequence
  Non-cyclic GFR-binding peptide
RVPSTSSAPTKTSATSVLYY

SEQ ID NO: 82 - protein, 20 aa, Artificial Sequence
  Non-cyclic GFR-binding peptide
ASAAPSSAPTALSATSVLYY

SEQ ID NO: 83 - protein, 20 aa, Artificial Sequence
  Non-cyclic GFR-binding peptide
TVPKPSSAPTQLRSVKVAKV

SEQ ID NO: 84 - protein, 20 aa, Artificial Sequence
  Non-cyclic GFR-binding peptide
KVGKASSVPQKLEPLPIVYY

SEQ ID NO: 85 - protein, 20 aa, Artificial Sequence
  Non-cyclic GFR-binding peptide
KASKASSVPQKLEPLPIVYY

SEQ ID NO: 86 - protein, 20 aa, Artificial Sequence
  Non-cyclic GFR-binding peptide
RNVQSRPVPTQLSPISVLYK

SEQ ID NO: 87 - protein, 20 aa, Artificial Sequence
  Non-cyclic GFR-binding peptide
KIPKASSVPTELSPISVLYK

SEQ ID NO: 88 - protein, 20 aa, Artificial Sequence
  Non-cyclic GFR-binding peptide
ASAAPSSVPQALRSVKVAKV

SEQ ID NO: 89 - protein, 13 aa, Artificial Sequence
  Non-cyclic GFR-binding peptide
VSQDLRSVKVAKV

SEQ ID NO: 90 - protein, 20 aa, Artificial Sequence
  Non-cyclic GFR-binding peptide
ASASPSSVPQDLRSVKVAKV

SEQ ID NO: 91 - protein, 20 aa, Artificial Sequence
  Non-cyclic GFR-binding peptide
NDEGLESVPTEERSVKVAKV

SEQ ID NO: 92 - protein, 13 aa, Artificial Sequence
  Non-cyclic GFR-binding peptide
TQVKMRPVQVRKI

SEQ ID NO: 93 - protein, 20 aa, Artificial Sequence
  Non-cyclic GFR-binding peptide
KIPKASSTPTELSPINMLYF

SEQ ID NO: 94 - protein, 20 aa, Artificial Sequence
  Non-cyclic GFR-binding peptide
GIPEPSSTPTKMSPINMLYF

SEQ ID NO: 95 - protein, 13 aa, Artificial Sequence
  Non-cyclic GFR-binding peptide
VPTGQSAISMLYL

SEQ ID NO: 96 - protein, 20 aa, Artificial Sequence
  Non-cyclic GFR-binding peptide
NDEGLESVPTEESAISMLYL

SEQ ID NO: 97 - protein, 20 aa, Artificial Sequence
  Non-cyclic GFR-binding peptide
SSVKSQPSRVHHSPISILFI

SEQ ID NO: 98 - protein, 20 aa, Artificial Sequence
  Non-cyclic GFR-binding peptide
RNVQSRPTQVQLSPISILFI

SEQ ID NO: 99 - protein, 20 aa, Artificial Sequence
  Non-cyclic GFR-binding peptide
YVPKPSSAPTKLNAISVLYF

SEQ ID NO: 100 - protein, 20 aa, Artificial Sequence
  Non-cyclic GFR-binding peptide
HVPKPSSAPTKLEPISILYL

SEQ ID NO: 101 - protein, 20 aa, Artificial Sequence
  Non-cyclic GFR-binding peptide
LYLISIPSLQTPVPRSQVNR

SEQ ID NO: 102 - protein, 20 aa, Artificial Sequence
  Non-cyclic GFR-binding peptide
FYLTSIANLKTPASSPKPVY

SEQ ID NO: 103 - protein, 20 aa, Artificial Sequence
  Non-cyclic GFR-binding peptide
LYLMSIASTKTPVSSTSPVR

SEQ ID NO: 104 - protein, 20 aa, Artificial Sequence
  Non-cyclic GFR-binding peptide
LYLISIPELKTPASSPKPVH

SEQ ID NO: 105 - protein, 20 aa, Artificial Sequence
  Non-cyclic GFR-binding peptide
FFLISLSSLKEPVSTPKTVH

SEQ ID NO: 106 - protein, 20 aa, Artificial Sequence
  Non-cyclic GFR-binding peptide
YYLITLPELKQSVSSAKGVK

SEQ ID NO: 107 - protein, 20 aa, Artificial Sequence
  Non-cyclic GFR-binding peptide
FYLVSIANLTPVTPRSQVNR

SEQ ID NO: 108 - protein, 20 aa, Artificial Sequence
  Non-cyclic GFR-binding peptide
LYLTSIASLKTPASSPKPVH

SEQ ID NO: 109 - protein, 20 aa, Artificial Sequence
  Non-cyclic GFR-binding peptide
LYLMSIASLKTPASSAKPVA

SEQ ID NO: 110 - protein, 20 aa, Artificial Sequence
  Non-cyclic GFR-binding peptide
LYLTSIASLKTPVSSAKGVK

SEQ ID NO: 111 - protein, 18 aa, Artificial Sequence
  Non-cyclic GFR-binding peptide
FYLMSIANLQTPASSPKP

SEQ ID NO: 112 - protein, 20 aa, Artificial Sequence
  Non-cyclic GFR-binding peptide
LYLTSIASLETPVSSAKPVK

SEQ ID NO: 113 - protein, 20 aa, Artificial Sequence
  Non-cyclic GFR-binding peptide
LYLTSIASLQTPASSPKPVK

SEQ ID NO: 114 - protein, 20 aa, Artificial Sequence
  Non-cyclic GFR-binding peptide
LYLTSIASLKTPVSSAKGVK

SEQ ID NO: 115 - protein, 20 aa, Artificial Sequence
  Non-cyclic GFR-binding peptide
LYLMSIASLQTPASSPKPVT

SEQ ID NO: 116 - protein, 20 aa, Artificial Sequence
  Non-cyclic GFR-binding peptide
LYLTSIASLKTPASSAKPVA

SEQ ID NO: 117 - protein, 20 aa, Artificial Sequence
  Non-cyclic GFR-binding peptide
LYLMSIASLKTPVSSAKGVK

SEQ ID NO: 118 - protein, 20 aa, Artificial Sequence
  Non-cyclic GFR-binding peptide
LYLTSIASLKTPVSSAKGGG

SEQ ID NO: 119 - protein, 21 aa, Artificial Sequence
  Non-cyclic GFR-binding peptide
LYLTSIASLETPVGGAKPIKR

SEQ ID NO: 120 - protein, 20 aa, Artificial Sequence
  Non-cyclic GFR-binding peptide
VYLMSLPKHHVRSPQSKVSS

SEQ ID NO: 121 - protein, 21 aa, Artificial Sequence
  Non-cyclic GFR-binding peptide
LYLMSIASLETPVSSAKPIKR

SEQ ID NO: 122 - protein, 20 aa, Artificial Sequence
  Non-cyclic GFR-binding peptide
VYLMSLPKLQVQTPRSQVNR

SEQ ID NO: 123 - protein, 20 aa, Artificial Sequence
  Non-cyclic GFR-binding peptide
YYVIPLPELEQPVSSAKPIK

SEQ ID NO: 124 - protein, 20 aa, Artificial Sequence
  Non-cyclic GFR-binding peptide
IYLISIPSLRAPVSSSAPAA

SEQ ID NO: 125 - protein, 20 aa, Artificial Sequence
  Non-cyclic GFR-binding peptide
IYLISIPSMKEPVSSPEPIG

SEQ ID NO: 126 - protein, 20 aa, Artificial Sequence
  Non-cyclic GFR-binding peptide
IYLLSIPSLRAPVSSSAPAA

SEQ ID NO: 127 - protein, 20 aa, Artificial Sequence
  Non-cyclic GFR-binding peptide
YYVMPLPELKTPASSAKPVK

SEQ ID NO: 128 - protein, 20 aa, Artificial Sequence
  Non-cyclic GFR-binding peptide
YYLITLPELQQSVSSAKPIK

SEQ ID NO: 129 - protein, 20 aa, Artificial Sequence
  Non-cyclic GFR-binding peptide
YYVTPLPEMKTPVSSPEPIK

SEQ ID NO: 130 - protein, 20 aa, Artificial Sequence
  Non-cyclic GFR-binding peptide
YYVIPLPELETPVSSAKPIK

SEQ ID NO: 131 - protein, 20 aa, Artificial Sequence
  Non-cyclic GFR-binding peptide
YYLITLPELKTPVSSAKGVK

SEQ ID NO: 132 - protein, 20 aa, Artificial Sequence
  Non-cyclic GFR-binding peptide
YYVIPLPEMKQPVSSPEPIK

SEQ ID NO: 133 - protein, 20 aa, Artificial Sequence
  Non-cyclic GFR-binding peptide
YYVIPLPELETPVSSAKPIK

SEQ ID NO: 134 - protein, 20 aa, Artificial Sequence
  Non-cyclic GFR-binding peptide
YYVIPLPELAQPVSSPAASA

SEQ ID NO: 135 - protein, 20 aa, Artificial Sequence
  Non-cyclic GFR-binding peptide
YYVIPLPELETPVSSAKPIK

SEQ ID NO: 136 - protein, 20 aa, Artificial Sequence
  Non-cyclic GFR-binding peptide
YYLITLPELATPVSSPAASA

SEQ ID NO: 137 - protein, 20 aa, Artificial Sequence
  Non-cyclic GFR-binding peptide
YYVIPLPELETPVAAAKPIK

SEQ ID NO: 138 - protein, 20 aa, Artificial Sequence
  Non-cyclic GFR-binding peptide
LYLIPLPELAQPVSSPAASA

SEQ ID NO: 139 - protein, 20 aa, Artificial Sequence
  Non-cyclic GFR-binding peptide
FYLIPLPELETPVSSAKPIK

SEQ ID NO: 140 - protein, 20 aa, Artificial Sequence
  Non-cyclic GFR-binding peptide
KYLIPLPELAQPVSSPAASA

SEQ ID NO: 141 - protein, 20 aa, Artificial Sequence
  Non-cyclic GFR-binding peptide
VKAVKVSRLAQPVSSPAASA

SEQ ID NO: 142 - protein, 20 aa, Artificial Sequence
  Non-cyclic GFR-binding peptide
VKATKMSRLDQSVVRLGGGA

SEQ ID NO: 143 - protein, 20 aa, Artificial Sequence
  Non-cyclic GFR-binding peptide
IKRVQMPRLAQPVSSPAASA

SEQ ID NO: 144 - protein, 20 aa, Artificial Sequence
  Non-cyclic GFR-binding peptide
VKAMKVSREETPVSELGEDN

SEQ ID NO: 145 - protein, 20 aa, Artificial Sequence
  Non-cyclic GFR-binding peptide
IKRVQTPRLDVQTSSPSASA

SEQ ID NO: 146 - protein, 18 aa, Artificial Sequence
  Non-cyclic GFR-binding peptide
LYLMSIASLKTPAPGPTG

SEQ ID NO: 147 - protein, 20 aa, Artificial Sequence
  Non-cyclic GFR-binding peptide
FYLTSIANLKTPMSSAKGVK

SEQ ID NO: 148 - protein, 20 aa, Artificial Sequence
  Non-cyclic GFR-binding peptide
MIQMTINSEETPVSELGEDN

SEQ ID NO: 149 - protein, 20 aa, Artificial Sequence
  Non-cyclic GFR-binding peptide
IYLISIPSLQTPASSPKPVT

SEQ ID NO: 150 - protein, 20 aa, Artificial Sequence
  Non-cyclic GFR-binding peptide
YYLITLPELDQPVSSPSASA

SEQ ID NO: 151 - protein, 22 aa, Artificial Sequence
  Non-cyclic GFR-binding peptide
KYLTSIPSLETPVSSAKPGPTG

SEQ ID NO: 152 - protein, 22 aa, Artificial Sequence
  Non-cyclic GFR-binding peptide
KYLTSIPSLETPVSSAKPGPTG

SEQ ID NO: 153 - protein, 23 aa, Artificial Sequence
  Non-cyclic GFR-binding peptide
FYLMSIANLQTPASSPKPPGPTG

SEQ ID NO: 154 - protein, 22 aa, Artificial Sequence
  Non-cyclic GFR-binding peptide
KYLTSIPSLETPVSSAKGWFWW

SEQ ID NO: 155 - protein, 20 aa, Artificial Sequence
  Non-cyclic GFR-binding peptide
MIQMTINSEETPVSELGEDN

SEQ ID NO: 156 - protein, 8 aa, Artificial Sequence
  Non-cyclic GFR-binding peptide
FYLMNIPS

SEQ ID NO: 157 - protein, 13 aa, Artificial Sequence
  Non-cyclic GFR-binding peptide
FYLMNIPSMKTPT

SEQ ID NO: 158 - protein, 10 aa, Artificial Sequence
  Non-cyclic GFR-binding peptide
LYLTSIASLK

SEQ ID NO: 159 - protein, 10 aa, Artificial Sequence
  Non-cyclic GFR-binding peptide
LYLTSIASLK

SEQ ID NO: 160 - protein, 20 aa, Artificial Sequence
  Non-cyclic GFR-binding peptide
MIQMTINSLKTPVSSAKPVA

SEQ ID NO: 161 - protein, 20 aa, Artificial Sequence
  Non-cyclic GFR-binding peptide
FYLMSIANLKTPASSPKPVY

SEQ ID NO: 162 - protein, 20 aa, Artificial Sequence
  Non-cyclic GFR-binding peptide
LYLMSIASTKTPVSSTSPVK

SEQ ID NO: 163 - protein, 20 aa, Artificial Sequence
  Non-cyclic GFR-binding peptide
LYLMSIPELKTPASSPKPVK

SEQ ID NO: 164 - protein, 20 aa, Artificial Sequence
  Non-cyclic GFR-binding peptide
FYLMNIPSLETPTSSAKPIS

SEQ ID NO: 165 - protein, 18 aa, Artificial Sequence
  Non-cyclic GFR-binding peptide
FYLMNIPSLKTPTSTPKT

SEQ ID NO: 166 - protein, 20 aa, Artificial Sequence
  Non-cyclic GFR-binding peptide
FYLMNIPSLKTPTSSPKPVY

SEQ ID NO: 167 - protein, 20 aa, Artificial Sequence
  Non-cyclic GFR-binding peptide
FFLISLSSLAQPVSSPAASA

SEQ ID NO: 168 - protein, 20 aa, Artificial Sequence
  Non-cyclic GFR-binding peptide
FFLISLSSLDQSVSSPSASA

SEQ ID NO: 169 - protein, 20 aa, Artificial Sequence
  Non-cyclic GFR-binding peptide
LYLISIPELQTPASSPKPVV

SEQ ID NO: 170 - protein, 20 aa, Artificial Sequence
  Non-cyclic GFR-binding peptide
LYLISIPELKTPASSAKPVA

SEQ ID NO: 171 - protein, 20 aa, Artificial Sequence
  Non-cyclic GFR-binding peptide
LYLISIPELKTPVSSAKGVK

SEQ ID NO: 172 - protein, 20 aa, Artificial Sequence
  Non-cyclic GFR-binding peptide
VYLMSLPKHHVRSPQSKVSS

SEQ ID NO: 173 - protein, 20 aa, Artificial Sequence
  Non-cyclic GFR-binding peptide
VYLMSLPKLQVQTPRSQVNR

SEQ ID NO: 174 - protein, 20 aa, Artificial Sequence
  Non-cyclic GFR-binding peptide
YYVIPLPELEQPVSSAKPIK

SEQ ID NO: 175 - protein, 20 aa, Artificial Sequence
  Non-cyclic GFR-binding peptide
YYVIPLPEMKQPVSSPEPIG

SEQ ID NO: 176 - protein, 20 aa, Artificial Sequence
  Non-cyclic GFR-binding peptide
YYVIPLPELEQPVSSAKPIS

SEQ ID NO: 177 - protein, 20 aa, Artificial Sequence
  Non-cyclic GFR-binding peptide
YYLITLPELAQPVSSPAASA

SEQ ID NO: 178 - protein, 20 aa, Artificial Sequence
  Non-cyclic GFR-binding peptide
YYLITLPELDQSVSSPSASA

SEQ ID NO: 179 - protein, 20 aa, Artificial Sequence
  Non-cyclic GFR-binding peptide
YYLITLPEEETPVSELGEDN

SEQ ID NO: 180 - protein, 20 aa, Artificial Sequence
  Non-cyclic GFR-binding peptide
FFLISLSSEETPVSELGEDN

SEQ ID NO: 181 - protein, 20 aa, Artificial Sequence
  Non-cyclic GFR-binding peptide
YYLVSTASTKTPASSTSPVR

SEQ ID NO: 182 - protein, 20 aa, Artificial Sequence
  Non-cyclic GFR-binding peptide
YYLVSTASLATPASSPAASA

SEQ ID NO: 183 - protein, 20 aa, Artificial Sequence
  Non-cyclic GFR-binding peptide
VKAVKVSRLQTPASSPKPVT

SEQ ID NO: 184 - protein, 20 aa, Artificial Sequence
  Non-cyclic GFR-binding peptide
YYVIPLPELKQPVSSAKGVK

SEQ ID NO: 185 - protein, 20 aa, Artificial Sequence
  Non-cyclic GFR-binding peptide
YYVIPLPELKQPVSSAKSAK

SEQ ID NO: 186 - protein, 20 aa, Artificial Sequence
  Non-cyclic GFR-binding peptide
KYLVSIPSLQTPVPRSQVNR

SEQ ID NO: 187 - protein, 20 aa, Artificial Sequence
  Non-cyclic GFR-binding peptide
KYLVSIPSLETPVSSAKPIK

SEQ ID NO: 188 - protein, 20 aa, Artificial Sequence
  Non-cyclic GFR-binding peptide
VKAVKVSRLAQPVSSPAASA

SEQ ID NO: 189 - protein, 13 aa, Artificial Sequence
  Non-cyclic GFR-binding peptide
VKAVKVSRLDQSV

SEQ ID NO: 190 - protein, 20 aa, Artificial Sequence
  Non-cyclic GFR-binding peptide
VKAVKVSRLDQPVSSPSASA

SEQ ID NO: 191 - protein, 20 aa, Artificial Sequence
  Non-cyclic GFR-binding peptide
VKAVKVSREETPVSELGEDN

SEQ ID NO: 192 - protein, 13 aa, Artificial Sequence
  Non-cyclic GFR-binding peptide
IKRVQVPRMKVQT

SEQ ID NO: 193 - protein, 20 aa, Artificial Sequence
  Non-cyclic GFR-binding peptide
FYLMNIPSLETPTSSAKPIK

SEQ ID NO: 194 - protein, 20 aa, Artificial Sequence
  Non-cyclic GFR-binding peptide
FYLMNIPSMKTPTSSPEPIG

SEQ ID NO: 195 - protein, 13 aa, Artificial Sequence
  Non-cyclic GFR-binding peptide
LYLMSIASQGTPV

SEQ ID NO: 196 - protein, 20 aa, Artificial Sequence
  Non-cyclic GFR-binding peptide
LYLMSIASEETPVSELGEDN

SEQ ID NO: 197 - protein, 20 aa, Artificial Sequence
  Non-cyclic GFR-binding peptide
IFLISIPSHHVRSPQSKVSS

SEQ ID NO: 198 - protein, 20 aa, Artificial Sequence
  Non-cyclic GFR-binding peptide
IFLISIPSLQVQTPRSQVNR

SEQ ID NO: 199 - protein, 20 aa, Artificial Sequence
  Non-cyclic GFR-binding peptide
FYLVSIANLKTPASSPKPVY

SEQ ID NO: 200 - protein, 20 aa, Artificial Sequence
  Non-cyclic GFR-binding peptide
LYLISIPELKTPASSPKPVH

SEQ ID NO: 201 - protein, 20 aa, Artificial Sequence
  Non-cyclic GFR-binding peptide
NDEGLESVPEDLSSLSVLFF

SEQ ID NO: 202 - protein, 20 aa, Artificial Sequence
  Non-cyclic GFR-binding peptide
RVPSTSSVPTGQSAISTLYL

SEQ ID NO: 203 - protein, 20 aa, Artificial Sequence
  Non-cyclic GFR-binding peptide
RVPSTSSAPTKMNAISMLYF

SEQ ID NO: 204 - protein, 20 aa, Artificial Sequence
  Non-cyclic GFR-binding peptide
GIPEPSSAPTELSATSILYY

SEQ ID NO: 205 - protein, 20 aa, Artificial Sequence
  Non-cyclic GFR-binding peptide
STPPTSSVPTELSPISTLYK

SEQ ID NO: 206 - protein, 20 aa, Artificial Sequence
  Non-cyclic GFR-binding peptide
GIPEPSSAPVDLKPLSTLYV

SEQ ID NO: 207 - protein, 20 aa, Artificial Sequence
  Non-cyclic GFR-binding peptide
AASKASSVPQEEEPLPMVYY

SEQ ID NO: 208 - protein, 20 aa, Artificial Sequence
  Non-cyclic GFR-binding peptide
KIPKASSVSQKMEPLTMLYY

SEQ ID NO: 209 - protein, 20 aa, Artificial Sequence
  Non-cyclic GFR-binding peptide
KIPKASSVPTGGSNITVQIM

SEQ ID NO: 210 - protein, 20 aa, Artificial Sequence
  Non-cyclic GFR-binding peptide
AASKASSSRVELRSVKIAKV

SEQ ID NO: 211 - protein, 20 aa, Artificial Sequence
  Non-cyclic GFR-binding peptide
KIPKASSTQVRLRPVQIRKI

SEQ ID NO: 212 - protein, 20 aa, Artificial Sequence
  Non-cyclic GFR-binding peptide
STPPTSSSRVQLSAISMLYL

SEQ ID NO: 213 - protein, 20 aa, Artificial Sequence
  Non-cyclic GFR-binding peptide
RVPSTSSTQVKMSAISMLYL

SEQ ID NO: 214 - protein, 20 aa, Artificial Sequence
  Non-cyclic GFR-binding peptide
GIPEPSSVSQEESSLSTLFF

SEQ ID NO: 215 - protein, 20 aa, Artificial Sequence
  Non-cyclic GFR-binding peptide
KIPKASSSRVRLSSLSTLFF

SEQ ID NO: 216 - protein, 20 aa, Artificial Sequence
  Non-cyclic GFR-binding peptide
AASKASSTPTDLNAISTLYF

SEQ ID NO: 217 - protein, 20 aa, Artificial Sequence
  Non-cyclic GFR-binding peptide
RVPSTSSTQVDLNAISVLYF

SEQ ID NO: 218 - protein, 20 aa, Artificial Sequence
  Non-cyclic GFR-binding peptide
GIPEPSSVSQELSATSMLYY

SEQ ID NO: 219 - protein, 20 aa, Artificial Sequence
  Non-cyclic GFR-binding peptide
KIPKASSTQVGQSATSILYY

SEQ ID NO: 220 - protein, 20 aa, Artificial Sequence
  Non-cyclic GFR-binding peptide
STPPTSSAPVGQSPISMLYI

SEQ ID NO: 221 - protein, 20 aa, Artificial Sequence
  Non-cyclic GFR-binding peptide
KIPKASSTPTRLSPISMLFI

SEQ ID NO: 222 - protein, 20 aa, Artificial Sequence
  Non-cyclic GFR-binding peptide
GIPEPSSAPTRLEPISMLYL

SEQ ID NO: 223 - protein, 20 aa, Artificial Sequence
  Non-cyclic GFR-binding peptide
KIPKASSVSQQLEPISTLYL

SEQ ID NO: 224 - protein, 20 aa, Artificial Sequence
  Non-cyclic GFR-binding peptide
STPPTSSVPTEVSPINTLYF

SEQ ID NO: 225 - protein, 20 aa, Artificial Sequence
  Non-cyclic GFR-binding peptide
AASKASSSRVKMSPINVLYF

SEQ ID NO: 226 - protein, 20 aa, Artificial Sequence
  Non-cyclic GFR-binding peptide
KIPKASSVPTKMKPLSVLYV

SEQ ID NO: 227 - protein, 20 aa, Artificial Sequence
  Non-cyclic GFR-binding peptide
RVPSTSSAPTKMKPLSMLYV

SEQ ID NO: 228 - protein, 20 aa, Artificial Sequence
  Non-cyclic GFR-binding peptide
STPPTSSVSQKMKPLSILYV

SEQ ID NO: 229 - protein, 20 aa, Artificial Sequence
  Non-cyclic GFR-binding peptide
KIPKASSVPAQLEPLPIVYY

SEQ ID NO: 230 - protein, 20 aa, Artificial Sequence
  Non-cyclic GFR-binding peptide
GIPEPSSAPVGQEPLPMVYY

SEQ ID NO: 231 - protein, 20 aa, Artificial Sequence
  Non-cyclic GFR-binding peptide
RVPSTSSVPEKMEPLTMLYY

SEQ ID NO: 232 - protein, 20 aa, Artificial Sequence
  Non-cyclic GFR-binding peptide
GIPEPSSAPVEEEPLTTLYY

SEQ ID NO: 233 - protein, 20 aa, Artificial Sequence
  Non-cyclic GFR-binding peptide
STPPTSSTPTKMSNITTQIM

SEQ ID NO: 234 - protein, 20 aa, Artificial Sequence
  Non-cyclic GFR-binding peptide
RVPSTSSVPAEESNITVQIM

SEQ ID NO: 235 - protein, 20 aa, Artificial Sequence
  Non-cyclic GFR-binding peptide
AASKASSVPQRLRSVKVAKV

SEQ ID NO: 236 - protein, 20 aa, Artificial Sequence
  Non-cyclic GFR-binding peptide
KIPKASSTQVRLRSVKTAKV

SEQ ID NO: 237 - protein, 20 aa, Artificial Sequence
  Non-cyclic GFR-binding peptide
AASKASSVPEKMRPVQTRKI

SEQ ID NO: 238 - protein, 20 aa, Artificial Sequence
  Non-cyclic GFR-binding peptide
GIPEPSSAPVDMRPVQIRKI

SEQ ID NO: 239 - protein, 20 aa, Artificial Sequence
  Non-cyclic GFR-binding peptide
GVPKPSSVPTKLSAISTLYL

SEQ ID NO: 240 - protein, 20 aa, Artificial Sequence
  Non-cyclic GFR-binding peptide
CSAAPSSVPTALSAISMLYL

SEQ ID NO: 241 - protein, 20 aa, Artificial Sequence
  Non-cyclic GFR-binding peptide
GIPEPSSVPTKMSAISMLYL

SEQ ID NO: 242 - protein, 20 aa, Artificial Sequence
  Non-cyclic GFR-binding peptide
HVTKPTSVPTKLSAISMLYL

SEQ ID NO: 243 - protein, 20 aa, Artificial Sequence
  Non-cyclic GFR-binding peptide
YVPKPSSVPTKLSAISMLYL

SEQ ID NO: 244 - protein, 20 aa, Artificial Sequence
  Non-cyclic GFR-binding peptide
TVPKPSSVPTQLSAISMLYL

SEQ ID NO: 245 - protein, 20 aa, Artificial Sequence
  Non-cyclic GFR-binding peptide
AVPKASSVPTKLSAISMLYL

SEQ ID NO: 246 - protein, 20 aa, Artificial Sequence
  Non-cyclic GFR-binding peptide
KASKASSVPTKLSAISMLYL

SEQ ID NO: 247 - protein, 20 aa, Artificial Sequence
  Non-cyclic GFR-binding peptide
HVPKPSSVPTKLSAISMLYL

SEQ ID NO: 248 - protein, 20 aa, Artificial Sequence
  Non-cyclic GFR-binding peptide
ASAAPSSVPTALSAISMLYL

SEQ ID NO: 249 - protein, 20 aa, Artificial Sequence
  Non-cyclic GFR-binding peptide
ASASPSSVPTDLSAISMLYL

SEQ ID NO: 250 - protein, 20 aa, Artificial Sequence
  Non-cyclic GFR-binding peptide
GIPEPSSVPEKMSAISMLYL

SEQ ID NO: 251 - protein, 20 aa, Artificial Sequence
  Non-cyclic GFR-binding peptide
HVTKPTSAPTKLSAISMLYL

SEQ ID NO: 252 - protein, 20 aa, Artificial Sequence
  Non-cyclic GFR-binding peptide
YVPKPSSAPTKLSAISMLYL

SEQ ID NO: 253 - protein, 20 aa, Artificial Sequence
  Non-cyclic GFR-binding peptide
GSAGPSSTPTKMSAISMLYL

SEQ ID NO: 254 - protein, 20 aa, Artificial Sequence
  Non-cyclic GFR-binding peptide
AAPASSSVPARLSAISMLYL

SEQ ID NO: 255 - protein, 20 aa, Artificial Sequence
  Non-cyclic GFR-binding peptide
RVPSTSSAPVKTSAISMLYL

SEQ ID NO: 256 - protein, 20 aa, Artificial Sequence
  Non-cyclic GFR-binding peptide
ASAAPSSVPQALSAISMLYL

SEQ ID NO: 257 - protein, 20 aa, Artificial Sequence
  Non-cyclic GFR-binding peptide
ASASPSSVPQDLSAISMLYL

SEQ ID NO: 258 - protein, 20 aa, Artificial Sequence
  Non-cyclic GFR-binding peptide
SSVKSQPSRVHHSAISMLYL

SEQ ID NO: 259 - protein, 20 aa, Artificial Sequence
  Non-cyclic GFR-binding peptide
KIPKASSVPEELSSLSILFF

SEQ ID NO: 260 - protein, 20 aa, Artificial Sequence
  Non-cyclic GFR-binding peptide
SIPKASSVPEELSSLSILFF

SEQ ID NO: 261 - protein, 20 aa, Artificial Sequence
  Non-cyclic GFR-binding peptide
YVPKPSSVPEKLSSLSILFF

SEQ ID NO: 262 - protein, 20 aa, Artificial Sequence
  Non-cyclic GFR-binding peptide
TVPKPSSVPEQLSSLSILFF

SEQ ID NO: 263 - protein, 20 aa, Artificial Sequence
  Non-cyclic GFR-binding peptide
AVPKASSVPEKLSSLSILFF

SEQ ID NO: 264 - protein, 20 aa, Artificial Sequence
  Non-cyclic GFR-binding peptide
KVGKASSVPEKLSSLSILFF

SEQ ID NO: 265 - protein, 20 aa, Artificial Sequence
  Non-cyclic GFR-binding peptide
KASKASSVPEKLSSLSILFF

SEQ ID NO: 266 - protein, 20 aa, Artificial Sequence
  Non-cyclic GFR-binding peptide
AAPASSSVPERLSSLSILFF

SEQ ID NO: 267 - protein, 20 aa, Artificial Sequence
  Non-cyclic GFR-binding peptide
STPPTSSVPERLSSLSILFF

SEQ ID NO: 268 - protein, 20 aa, Artificial Sequence
  Non-cyclic GFR-binding peptide
HVPKPSSVPEKLSSLSILFF

SEQ ID NO: 269 - protein, 20 aa, Artificial Sequence
  Non-cyclic GFR-binding peptide
RVPSTSSVPEKTSSLSILFF

SEQ ID NO: 270 - protein, 20 aa, Artificial Sequence
  Non-cyclic GFR-binding peptide
ASAAPSSVPEALSSLSILFF

SEQ ID NO: 271 - protein, 20 aa, Artificial Sequence
  Non-cyclic GFR-binding peptide
ASASPSSVPEDLSSLSILFF

SEQ ID NO: 272 - protein, 20 aa, Artificial Sequence
  Non-cyclic GFR-binding peptide
KIPKASSVPTELSSLSILFF

SEQ ID NO: 273 - protein, 20 aa, Artificial Sequence
  Non-cyclic GFR-binding peptide
SIPKASSVPTELSSLSILFF

SEQ ID NO: 274 - protein, 20 aa, Artificial Sequence
  Non-cyclic GFR-binding peptide
HVTKPTSAPTKLSSLSILFF

SEQ ID NO: 275 - protein, 20 aa, Artificial Sequence
  Non-cyclic GFR-binding peptide
YVPKPSSAPTKLSSLSILFF

SEQ ID NO: 276 - protein, 20 aa, Artificial Sequence
  Non-cyclic GFR-binding peptide
TVPKPSSAPTQLSSLSILFF

SEQ ID NO: 277 - protein, 20 aa, Artificial Sequence
  Non-cyclic GFR-binding peptide
AVPKASSAPTKLSSLSILFF

SEQ ID NO: 278 - protein, 20 aa, Artificial Sequence
  Non-cyclic GFR-binding peptide
KVGKASSVPTKLSSLSILFF

SEQ ID NO: 279 - protein, 20 aa, Artificial Sequence
  Non-cyclic GFR-binding peptide
KASKASSVPTKLSSLSILFF

SEQ ID NO: 280 - protein, 20 aa, Artificial Sequence
  Non-cyclic GFR-binding peptide
GSAGPSSTPTKMSSLSILFF

SEQ ID NO: 281 - protein, 20 aa, Artificial Sequence
  Non-cyclic GFR-binding peptide
AAPASSSVPARLSSLSILFF

SEQ ID NO: 282 - protein, 20 aa, Artificial Sequence
  Non-cyclic GFR-binding peptide
STPPTSSVPTRLSSLSILFF

SEQ ID NO: 283 - protein, 20 aa, Artificial Sequence
  Non-cyclic GFR-binding peptide
HVPKPSSAPTKLSSLSILFF

SEQ ID NO: 284 - protein, 20 aa, Artificial Sequence
  Non-cyclic GFR-binding peptide
RVPSTSSAPVKTSSLSILFF

SEQ ID NO: 285 - protein, 20 aa, Artificial Sequence
  Non-cyclic GFR-binding peptide
ASASPSSVPQDLSSLSILFF

SEQ ID NO: 286 - protein, 20 aa, Artificial Sequence
  Non-cyclic GFR-binding peptide
NDEGLESVPTGQSSLSILFF

SEQ ID NO: 287 - protein, 20 aa, Artificial Sequence
  Non-cyclic GFR-binding peptide
SSVKSQPSRVHHSSLSILFF

SEQ ID NO: 288 - protein, 20 aa, Artificial Sequence
  Non-cyclic GFR-binding peptide
RNVQSRPTQVQLSSLSILFF

SEQ ID NO: 289 - protein, 20 aa, Artificial Sequence
  Non-cyclic GFR-binding peptide
KIPKASSAPTELNAISVLYF

SEQ ID NO: 290 - protein, 20 aa, Artificial Sequence
  Non-cyclic GFR-binding peptide
GIPEPSSAPTKMNAISVLYF

SEQ ID NO: 291 - protein, 20 aa, Artificial Sequence
  Non-cyclic GFR-binding peptide
SIPKASSAPTELNAISVLYF

SEQ ID NO: 292 - protein, 20 aa, Artificial Sequence
  Non-cyclic GFR-binding peptide
AVPKASSAPTKLNAISVLYF

SEQ ID NO: 293 - protein, 20 aa, Artificial Sequence
  Non-cyclic GFR-binding peptide
KVGKASSAPTKLNAISVLYF

SEQ ID NO: 294 - protein, 20 aa, Artificial Sequence
  Non-cyclic GFR-binding peptide
KASKASSAPTKLNAISVLYF

SEQ ID NO: 295 - protein, 20 aa, Artificial Sequence
  Non-cyclic GFR-binding peptide
GSAGPSSAPTKMNAISVLYF

SEQ ID NO: 296 - protein, 20 aa, Artificial Sequence
  Non-cyclic GFR-binding peptide
AAPASSSAPTRLNAISVLYF

SEQ ID NO: 297 - protein, 20 aa, Artificial Sequence
  Non-cyclic GFR-binding peptide
STPPTSSAPTRLNAISVLYF

SEQ ID NO: 298 - protein, 20 aa, Artificial Sequence
  Non-cyclic GFR-binding peptide
RVPSTSSAPTKTNAISVLYF

SEQ ID NO: 299 - protein, 20 aa, Artificial Sequence
  Non-cyclic GFR-binding peptide
ASAAPSSAPTALNAISVLYF

SEQ ID NO: 300 - protein, 20 aa, Artificial Sequence
  Non-cyclic GFR-binding peptide
ASASPSSAPTDLNAISVLYF

SEQ ID NO: 301 - protein, 20 aa, Artificial Sequence
  Non-cyclic GFR-binding peptide
KIPKASSVPTELNAISVLYF

SEQ ID NO: 302 - protein, 20 aa, Artificial Sequence
  Non-cyclic GFR-binding peptide
GIPEPSSVPEKMNAISVLYF

SEQ ID NO: 303 - protein, 20 aa, Artificial Sequence
  Non-cyclic GFR-binding peptide
SIPKASSVPTELNAISVLYF

SEQ ID NO: 304 - protein, 20 aa, Artificial Sequence
  Non-cyclic GFR-binding peptide
KVGKASSVPTKLNAISVLYF

SEQ ID NO: 305 - protein, 20 aa, Artificial Sequence
  Non-cyclic GFR-binding peptide
KASKASSVPTKLNAISVLYF

SEQ ID NO: 306 - protein, 20 aa, Artificial Sequence
  Non-cyclic GFR-binding peptide
GSAGPSSTPTKMNAISVLYF

SEQ ID NO: 307 - protein, 20 aa, Artificial Sequence
  Non-cyclic GFR-binding peptide
AAPASSSVPARLNAISVLYF

SEQ ID NO: 308 - protein, 20 aa, Artificial Sequence
  Non-cyclic GFR-binding peptide
STPPTSSVPTRLNAISVLYF

SEQ ID NO: 309 - protein, 20 aa, Artificial Sequence
  Non-cyclic GFR-binding peptide
RVPSTSSAPVKTNAISVLYF

SEQ ID NO: 310 - protein, 20 aa, Artificial Sequence
  Non-cyclic GFR-binding peptide
ASAAPSSVPQALNAISVLYF

SEQ ID NO: 311 - protein, 20 aa, Artificial Sequence
  Non-cyclic GFR-binding peptide
ASASPSSVSQDLNAISVLYF

SEQ ID NO: 312 - protein, 20 aa, Artificial Sequence
  Non-cyclic GFR-binding peptide
ASASPSSVPQDLNAISVLYF

SEQ ID NO: 313 - protein, 20 aa, Artificial Sequence
  Non-cyclic GFR-binding peptide
NDEGLESVPTEENAISVLYF

SEQ ID NO: 314 - protein, 20 aa, Artificial Sequence
  Non-cyclic GFR-binding peptide
SSVKSQPSRVHHNAISVLYF

SEQ ID NO: 315 - protein, 20 aa, Artificial Sequence
  Non-cyclic GFR-binding peptide
KIPKASSAPTELSATSVLYY

SEQ ID NO: 316 - protein, 20 aa, Artificial Sequence
  Non-cyclic GFR-binding peptide
GIPEPSSAPTKMSATSVLYY

SEQ ID NO: 317 - protein, 20 aa, Artificial Sequence
  Non-cyclic GFR-binding peptide
SIPKASSAPTELSATSVLYY

SEQ ID NO: 318 - protein, 20 aa, Artificial Sequence
  Non-cyclic GFR-binding peptide
HVTKPTSAPTKLSATSVLYY

SEQ ID NO: 319 - protein, 20 aa, Artificial Sequence
  Non-cyclic GFR-binding peptide
YVPKPSSAPTKLSATSVLYY

SEQ ID NO: 320 - protein, 20 aa, Artificial Sequence
  Non-cyclic GFR-binding peptide
TVPKPSSAPTQLSATSVLYY

SEQ ID NO: 321 - protein, 20 aa, Artificial Sequence
  Non-cyclic GFR-binding peptide
KVGKASSAPTKLSATSVLYY

SEQ ID NO: 322 - protein, 20 aa, Artificial Sequence
  Non-cyclic GFR-binding peptide
KASKASSAPTKLSATSVLYY

SEQ ID NO: 323 - protein, 20 aa, Artificial Sequence
  Non-cyclic GFR-binding peptide
GSAGPSSAPTKMSATSVLYY

SEQ ID NO: 324 - protein, 20 aa, Artificial Sequence
  Non-cyclic GFR-binding peptide
AAPASSSAPTRLSATSVLYY

SEQ ID NO: 325 - protein, 20 aa, Artificial Sequence
  Non-cyclic GFR-binding peptide
STPPTSSAPTRLSATSVLYY

SEQ ID NO: 326 - protein, 20 aa, Artificial Sequence
  Non-cyclic GFR-binding peptide
HVPKPSSAPTKLSATSVLYY

SEQ ID NO: 327 - protein, 20 aa, Artificial Sequence
  Non-cyclic GFR-binding peptide
SIPKASSVPTELSATSVLYY

SEQ ID NO: 328 - protein, 20 aa, Artificial Sequence
  Non-cyclic GFR-binding peptide
KVGKASSVPTKLSATSVLYY

SEQ ID NO: 329 - protein, 20 aa, Artificial Sequence
  Non-cyclic GFR-binding peptide
KASKASSVPTKLSATSVLYY

SEQ ID NO: 330 - protein, 20 aa, Artificial Sequence
  Non-cyclic GFR-binding peptide
GSAGPSSTPTKMSATSVLYY

SEQ ID NO: 331 - protein, 20 aa, Artificial Sequence
  Non-cyclic GFR-binding peptide
AAPASSSVPARLSATSVLYY

SEQ ID NO: 332 - protein, 20 aa, Artificial Sequence
  Non-cyclic GFR-binding peptide
STPPTSSVPTRLSATSVLYY

SEQ ID NO: 333 - protein, 20 aa, Artificial Sequence
  Non-cyclic GFR-binding peptide
RVPSTSSAPVKTSATSVLYY

SEQ ID NO: 334 - protein, 20 aa, Artificial Sequence
  Non-cyclic GFR-binding peptide
ASAAPSSVPQALSATSVLYY

SEQ ID NO: 335 - protein, 20 aa, Artificial Sequence
  Non-cyclic GFR-binding peptide
ASASPSSVSQDLSATSVLYY

SEQ ID NO: 336 - protein, 20 aa, Artificial Sequence
  Non-cyclic GFR-binding peptide
ASASPSSVPQDLSATSVLYY

SEQ ID NO: 337 - protein, 20 aa, Artificial Sequence
  Non-cyclic GFR-binding peptide
NDEGLESVPTEESATSVLYY

SEQ ID NO: 338 - protein, 20 aa, Artificial Sequence
  Non-cyclic GFR-binding peptide
NDEGLESVPTGQSATSVLYY

SEQ ID NO: 339 - protein, 20 aa, Artificial Sequence
  Non-cyclic GFR-binding peptide
SSVKSQPSRVHHSATSVLYY

SEQ ID NO: 340 - protein, 20 aa, Artificial Sequence
  Non-cyclic GFR-binding peptide
RNVQSRPTQVQLSATSVLYY

SEQ ID NO: 341 - protein, 20 aa, Artificial Sequence
  Non-cyclic GFR-binding peptide
GIPEPSSVPTKMSPISVLYK

SEQ ID NO: 342 - protein, 20 aa, Artificial Sequence
  Non-cyclic GFR-binding peptide
SIPKASSVPTELSPISVLYK

SEQ ID NO: 343 - protein, 20 aa, Artificial Sequence
  Non-cyclic GFR-binding peptide
HVTKPTSVPTKLSPISVLYK

SEQ ID NO: 344 - protein, 20 aa, Artificial Sequence
  Non-cyclic GFR-binding peptide
YVPKPSSVPTKLSPISVLYK

SEQ ID NO: 345 - protein, 20 aa, Artificial Sequence
  Non-cyclic GFR-binding peptide
TVPKPSSVPTQLSPISVLYK

SEQ ID NO: 346 - protein, 20 aa, Artificial Sequence
  Non-cyclic GFR-binding peptide
AVPKASSVPTKLSPISVLYK

SEQ ID NO: 347 - protein, 20 aa, Artificial Sequence
  Non-cyclic GFR-binding peptide
KASKASSVPTKLSPISVLYK

SEQ ID NO: 348 - protein, 20 aa, Artificial Sequence
  Non-cyclic GFR-binding peptide
AAPASSSVPTRLSPISVLYK

SEQ ID NO: 349 - protein, 20 aa, Artificial Sequence
  Non-cyclic GFR-binding peptide
STPPTSSVPTRLSPISVLYK

SEQ ID NO: 350 - protein, 20 aa, Artificial Sequence
  Non-cyclic GFR-binding peptide
RVPSTSSVPTKTSPISVLYK

SEQ ID NO: 351 - protein, 20 aa, Artificial Sequence
  Non-cyclic GFR-binding peptide
ASAAPSSVPTALSPISVLYK

SEQ ID NO: 352 - protein, 20 aa, Artificial Sequence
  Non-cyclic GFR-binding peptide
ASASPSSVPTDLSPISVLYK

SEQ ID NO: 353 - protein, 20 aa, Artificial Sequence
  Non-cyclic GFR-binding peptide
GIPEPSSVPEKMSPISVLYK

SEQ ID NO: 354 - protein, 20 aa, Artificial Sequence
  Non-cyclic GFR-binding peptide
HVTKPTSAPTKLSPISVLYK

SEQ ID NO: 355 - protein, 20 aa, Artificial Sequence
  Non-cyclic GFR-binding peptide
YVPKPSSAPTKLSPISVLYK

SEQ ID NO: 356 - protein, 20 aa, Artificial Sequence
  Non-cyclic GFR-binding peptide
TVPKPSSAPTQLSPISVLYK

SEQ ID NO: 357 - protein, 20 aa, Artificial Sequence
  Non-cyclic GFR-binding peptide
AVPKASSAPTKLSPISVLYK

SEQ ID NO: 358 - protein, 20 aa, Artificial Sequence
  Non-cyclic GFR-binding peptide
GSAGPSSTPTKMSPISVLYK

SEQ ID NO: 359 - protein, 20 aa, Artificial Sequence
  Non-cyclic GFR-binding peptide
AAPASSSVPARLSPISVLYK

SEQ ID NO: 360 - protein, 20 aa, Artificial Sequence
  Non-cyclic GFR-binding peptide
HVPKPSSAPTKLSPISVLYK

SEQ ID NO: 361 - protein, 20 aa, Artificial Sequence
  Non-cyclic GFR-binding peptide
RVPSTSSAPVKTSPISVLYK

SEQ ID NO: 362 - protein, 20 aa, Artificial Sequence
  Non-cyclic GFR-binding peptide
ASAAPSSVPQALSPISVLYK

SEQ ID NO: 363 - protein, 20 aa, Artificial Sequence
  Non-cyclic GFR-binding peptide
ASASPSSVSQDLSPISVLYK

SEQ ID NO: 364 - protein, 20 aa, Artificial Sequence
  Non-cyclic GFR-binding peptide
ASASPSSVPQDLSPISVLYK

SEQ ID NO: 365 - protein, 20 aa, Artificial Sequence
  Non-cyclic GFR-binding peptide
SSVKSQPSRVHHSPISVLYK

SEQ ID NO: 366 - protein, 20 aa, Artificial Sequence
  Non-cyclic GFR-binding peptide
RNVQSRPTQVQLSPISVLYK

SEQ ID NO: 367 - protein, 20 aa, Artificial Sequence
  Non-cyclic GFR-binding peptide
KIPKASSVPTELEPISILYL

SEQ ID NO: 368 - protein, 20 aa, Artificial Sequence
  Non-cyclic GFR-binding peptide
GIPEPSSVPTKMEPISILYL

SEQ ID NO: 369 - protein, 20 aa, Artificial Sequence
  Non-cyclic GFR-binding peptide
SIPKASSVPTELEPISILYL

SEQ ID NO: 370 - protein, 20 aa, Artificial Sequence
  Non-cyclic GFR-binding peptide
HVTKPTSVPTKLEPISILYL

SEQ ID NO: 371 - protein, 20 aa, Artificial Sequence
  Non-cyclic GFR-binding peptide
YVPKPSSVPTKLEPISILYL

SEQ ID NO: 372 - protein, 20 aa, Artificial Sequence
  Non-cyclic GFR-binding peptide
TVPKPSSVPTQLEPISILYL

SEQ ID NO: 373 - protein, 20 aa, Artificial Sequence
  Non-cyclic GFR-binding peptide
AVPKASSVPTKLEPISILYL

SEQ ID NO: 374 - protein, 20 aa, Artificial Sequence
  Non-cyclic GFR-binding peptide
GSAGPSSVPTKMEPISILYL

SEQ ID NO: 375 - protein, 20 aa, Artificial Sequence
  Non-cyclic GFR-binding peptide
AAPASSSVPTRLEPISILYL

SEQ ID NO: 376 - protein, 20 aa, Artificial Sequence
  Non-cyclic GFR-binding peptide
STPPTSSVPTRLEPISILYL

SEQ ID NO: 377 - protein, 20 aa, Artificial Sequence
  Non-cyclic GFR-binding peptide
HVPKPSSVPTKLEPISILYL

SEQ ID NO: 378 - protein, 20 aa, Artificial Sequence
  Non-cyclic GFR-binding peptide
RVPSTSSVPTKTEPISILYL

SEQ ID NO: 379 - protein, 20 aa, Artificial Sequence
  Non-cyclic GFR-binding peptide
ASAAPSSVPTALEPISILYL

SEQ ID NO: 380 - protein, 20 aa, Artificial Sequence
  Non-cyclic GFR-binding peptide
ASASPSSVPTDLEPISILYL

SEQ ID NO: 381 - protein, 20 aa, Artificial Sequence
  Non-cyclic GFR-binding peptide
GIPEPSSVPEKMEPISILYL

SEQ ID NO: 382 - protein, 20 aa, Artificial Sequence
  Non-cyclic GFR-binding peptide
HVTKPTSAPTKLEPISILYL

SEQ ID NO: 383 - protein, 20 aa, Artificial Sequence
  Non-cyclic GFR-binding peptide
YVPKPSSAPTKLEPISILYL

SEQ ID NO: 384 - protein, 20 aa, Artificial Sequence
  Non-cyclic GFR-binding peptide
TVPKPSSAPTQLEPISILYL

SEQ ID NO: 385 - protein, 20 aa, Artificial Sequence
  Non-cyclic GFR-binding peptide
GSAGPSSTPTKMEPISILYL

SEQ ID NO: 386 - protein, 20 aa, Artificial Sequence
  Non-cyclic GFR-binding peptide
AAPASSSVPARLEPISILYL

SEQ ID NO: 387 - protein, 20 aa, Artificial Sequence
  Non-cyclic GFR-binding peptide
ASAAPSSVPQALEPISILYL

SEQ ID NO: 388 - protein, 20 aa, Artificial Sequence
  Non-cyclic GFR-binding peptide
ASASPSSVSQDLEPISILYL

SEQ ID NO: 389 - protein, 20 aa, Artificial Sequence
  Non-cyclic GFR-binding peptide
ASASPSSVPQDLEPISILYL

SEQ ID NO: 390 - protein, 20 aa, Artificial Sequence
  Non-cyclic GFR-binding peptide
SSVKSQPSRVHHEPISILYL

SEQ ID NO: 391 - protein, 20 aa, Artificial Sequence
  Non-cyclic GFR-binding peptide
RNVQSRPTQVQLEPISILYL

SEQ ID NO: 392 - protein, 20 aa, Artificial Sequence
  Non-cyclic GFR-binding peptide
HVTKPTSTPTKLSPINMLYF

SEQ ID NO: 393 - protein, 20 aa, Artificial Sequence
  Non-cyclic GFR-binding peptide
TVPKPSSTPTQLSPINMLYF

SEQ ID NO: 394 - protein, 20 aa, Artificial Sequence
  Non-cyclic GFR-binding peptide
AVPKASSTPTKLSPINMLYF

SEQ ID NO: 395 - protein, 20 aa, Artificial Sequence
  Non-cyclic GFR-binding peptide
KVGKASSTPTKLSPINMLYF

SEQ ID NO: 396 - protein, 20 aa, Artificial Sequence
  Non-cyclic GFR-binding peptide
KASKASSTPTKLSPINMLYF

SEQ ID NO: 397 - protein, 20 aa, Artificial Sequence
  Non-cyclic GFR-binding peptide
AAPASSSTPTRLSPINMLYF

SEQ ID NO: 398 - protein, 20 aa, Artificial Sequence
  Non-cyclic GFR-binding peptide
STPPTSSTPTRLSPINMLYF

SEQ ID NO: 399 - protein, 20 aa, Artificial Sequence
  Non-cyclic GFR-binding peptide
HVPKPSSTPTKLSPINMLYF

SEQ ID NO: 400 - protein, 20 aa, Artificial Sequence
  Non-cyclic GFR-binding peptide
RVPSTSSTPTKTSPINMLYF

SEQ ID NO: 401 - protein, 20 aa, Artificial Sequence
  Non-cyclic GFR-binding peptide
ASAAPSSTPTALSPINMLYF

SEQ ID NO: 402 - protein, 20 aa, Artificial Sequence
  Non-cyclic GFR-binding peptide
ASASPSSTPTDLSPINMLYF

SEQ ID NO: 403 - protein, 20 aa, Artificial Sequence
  Non-cyclic GFR-binding peptide
KIPKASSVPTELSPINMLYF

SEQ ID NO: 404 - protein, 20 aa, Artificial Sequence
  Non-cyclic GFR-binding peptide
GIPEPSSVPEKMSPINMLYF

SEQ ID NO: 405 - protein, 20 aa, Artificial Sequence
  Non-cyclic GFR-binding peptide
SIPKASSVPTELSPINMLYF

SEQ ID NO: 406 - protein, 20 aa, Artificial Sequence
  Non-cyclic GFR-binding peptide
HVTKPTSAPTKLSPINMLYF

SEQ ID NO: 407 - protein, 20 aa, Artificial Sequence
  Non-cyclic GFR-binding peptide
YVPKPSSAPTKLSPINMLYF

SEQ ID NO: 408 - protein, 20 aa, Artificial Sequence
  Non-cyclic GFR-binding peptide
TVPKPSSAPTQLSPINMLYF

SEQ ID NO: 409 - protein, 20 aa, Artificial Sequence
  Non-cyclic GFR-binding peptide
AVPKASSAPTKLSPINMLYF

SEQ ID NO: 410 - protein, 20 aa, Artificial Sequence
  Non-cyclic GFR-binding peptide
KVGKASSVPTKLSPINMLYF

SEQ ID NO: 411 - protein, 20 aa, Artificial Sequence
  Non-cyclic GFR-binding peptide
KASKASSVPTKLSPINMLYF

SEQ ID NO: 412 - protein, 20 aa, Artificial Sequence
  Non-cyclic GFR-binding peptide
AAPASSSVPARLSPINMLYF

SEQ ID NO: 413 - protein, 20 aa, Artificial Sequence
  Non-cyclic GFR-binding peptide
STPPTSSVPTRLSPINMLYF

SEQ ID NO: 414 - protein, 20 aa, Artificial Sequence
  Non-cyclic GFR-binding peptide
HVPKPSSAPTKLSPINMLYF

SEQ ID NO: 415 - protein, 20 aa, Artificial Sequence
  Non-cyclic GFR-binding peptide
RVPSTSSAPVKTSPINMLYF

SEQ ID NO: 416 - protein, 20 aa, Artificial Sequence
  Non-cyclic GFR-binding peptide
ASAAPSSVPQALSPINMLYF

SEQ ID NO: 417 - protein, 20 aa, Artificial Sequence
  Non-cyclic GFR-binding peptide
ASASPSSVSQDLSPINMLYF

SEQ ID NO: 418 - protein, 20 aa, Artificial Sequence
  Non-cyclic GFR-binding peptide
ASASPSSVPQDLSPINMLYF

SEQ ID NO: 419 - protein, 20 aa, Artificial Sequence
  Non-cyclic GFR-binding peptide
NDEGLESVPTEESPINMLYF

SEQ ID NO: 420 - protein, 20 aa, Artificial Sequence
  Non-cyclic GFR-binding peptide
NDEGLESVPTGQSPINMLYF

SEQ ID NO: 421 - protein, 20 aa, Artificial Sequence
  Non-cyclic GFR-binding peptide
SSVKSQPSRVHHSPINMLYF

SEQ ID NO: 422 - protein, 20 aa, Artificial Sequence
  Non-cyclic GFR-binding peptide
RNVQSRPTQVQLSPINMLYF

SEQ ID NO: 423 - protein, 20 aa, Artificial Sequence
  Non-cyclic GFR-binding peptide
KIPKASSVPAELSPISILYI

SEQ ID NO: 424 - protein, 20 aa, Artificial Sequence
  Non-cyclic GFR-binding peptide
SIPKASSVPAELSPISILYI

SEQ ID NO: 425 - protein, 20 aa, Artificial Sequence
  Non-cyclic GFR-binding peptide
HVTKPTSVPAKLSPISILYI

SEQ ID NO: 426 - protein, 20 aa, Artificial Sequence
  Non-cyclic GFR-binding peptide
YVPKPSSVPAKLSPISILYI

SEQ ID NO: 427 - protein, 20 aa, Artificial Sequence
  Non-cyclic GFR-binding peptide
TVPKPSSVPAQLSPISILYI

SEQ ID NO: 428 - protein, 20 aa, Artificial Sequence
  Non-cyclic GFR-binding peptide
AVPKASSVPAKLSPISILYI

SEQ ID NO: 429 - protein, 20 aa, Artificial Sequence
  Non-cyclic GFR-binding peptide
KVGKASSVPAKLSPISILYI

SEQ ID NO: 430 - protein, 20 aa, Artificial Sequence
  Non-cyclic GFR-binding peptide
KASKASSVPAKLSPISILYI

SEQ ID NO: 431 - protein, 20 aa, Artificial Sequence
  Non-cyclic GFR-binding peptide
GSAGPSSVPAKMSPISILYI

SEQ ID NO: 432 - protein, 20 aa, Artificial Sequence
  Non-cyclic GFR-binding peptide
STPPTSSVPARLSPISILYI

SEQ ID NO: 433 - protein, 20 aa, Artificial Sequence
  Non-cyclic GFR-binding peptide
HVPKPSSVPAKLSPISILYI

SEQ ID NO: 434 - protein, 20 aa, Artificial Sequence
  Non-cyclic GFR-binding peptide
ASASPSSVPADLSPISILYI

SEQ ID NO: 435 - protein, 20 aa, Artificial Sequence
  Non-cyclic GFR-binding peptide
KIPKASSVPTELSPISILYI

SEQ ID NO: 436 - protein, 20 aa, Artificial Sequence
  Non-cyclic GFR-binding peptide
SIPKASSVPTELSPISILYI

SEQ ID NO: 437 - protein, 20 aa, Artificial Sequence
  Non-cyclic GFR-binding peptide
HVTKPTSAPTKLSPISILYI

SEQ ID NO: 438 - protein, 20 aa, Artificial Sequence
  Non-cyclic GFR-binding peptide
YVPKPSSAPTKLSPISILYI

SEQ ID NO: 439 - protein, 20 aa, Artificial Sequence
  Non-cyclic GFR-binding peptide
AVPKASSAPTKLSPISILYI

SEQ ID NO: 440 - protein, 20 aa, Artificial Sequence
  Non-cyclic GFR-binding peptide
KVGKASSVPTKLSPISILYI

SEQ ID NO: 441 - protein, 20 aa, Artificial Sequence
  Non-cyclic GFR-binding peptide
KASKASSVPTKLSPISILYI

SEQ ID NO: 442 - protein, 20 aa, Artificial Sequence
  Non-cyclic GFR-binding peptide
GSAGPSSTPTKMSPISILYI

SEQ ID NO: 443 - protein, 20 aa, Artificial Sequence
  Non-cyclic GFR-binding peptide
STPPTSSVPTRLSPISILYI

SEQ ID NO: 444 - protein, 20 aa, Artificial Sequence
  Non-cyclic GFR-binding peptide
HVPKPSSAPTKLSPISILYI

SEQ ID NO: 445 - protein, 20 aa, Artificial Sequence
  Non-cyclic GFR-binding peptide
RVPSTSSAPVKTSPISILYI

SEQ ID NO: 446 - protein, 20 aa, Artificial Sequence
  Non-cyclic GFR-binding peptide
ASAAPSSVPQALSPISILYI

SEQ ID NO: 447 - protein, 20 aa, Artificial Sequence
  Non-cyclic GFR-binding peptide
ASASPSSVSQDLSPISILYI

SEQ ID NO: 448 - protein, 20 aa, Artificial Sequence
  Non-cyclic GFR-binding peptide
ASASPSSVPQDLSPISILYI

SEQ ID NO: 449 - protein, 20 aa, Artificial Sequence
  Non-cyclic GFR-binding peptide
NDEGLESVPTGQSPISILYI

SEQ ID NO: 450 - protein, 20 aa, Artificial Sequence
  Non-cyclic GFR-binding peptide
SSVKSQPSRVHHSPISILYI

SEQ ID NO: 451 - protein, 20 aa, Artificial Sequence
  Non-cyclic GFR-binding peptide
RNVQSRPTQVQLSPISILYI

SEQ ID NO: 452 - protein, 20 aa, Artificial Sequence
  Non-cyclic GFR-binding peptide
KIPKASSVPTELSPISILFI

SEQ ID NO: 453 - protein, 20 aa, Artificial Sequence
  Non-cyclic GFR-binding peptide
GIPEPSSVPTKMSPISILFI

SEQ ID NO: 454 - protein, 20 aa, Artificial Sequence
  Non-cyclic GFR-binding peptide
SIPKASSVPTELSPISILFI

SEQ ID NO: 455 - protein, 20 aa, Artificial Sequence
  Non-cyclic GFR-binding peptide
HVTKPTSVPTKLSPISILFI

SEQ ID NO: 456 - protein, 20 aa, Artificial Sequence
  Non-cyclic GFR-binding peptide
YVPKPSSVPTKLSPISILFI

SEQ ID NO: 457 - protein, 20 aa, Artificial Sequence
  Non-cyclic GFR-binding peptide
TVPKPSSVPTQLSPISILFI

SEQ ID NO: 458 - protein, 20 aa, Artificial Sequence
  Non-cyclic GFR-binding peptide
AVPKASSVPTKLSPISILFI

SEQ ID NO: 459 - protein, 20 aa, Artificial Sequence
  Non-cyclic GFR-binding peptide
KVGKASSVPTKLSPISILFI

SEQ ID NO: 460 - protein, 20 aa, Artificial Sequence
  Non-cyclic GFR-binding peptide
KASKASSVPTKLSPISILFI

SEQ ID NO: 461 - protein, 20 aa, Artificial Sequence
  Non-cyclic GFR-binding peptide
GSAGPSSVPTKMSPISILFI

SEQ ID NO: 462 - protein, 20 aa, Artificial Sequence
  Non-cyclic GFR-binding peptide
AAPASSSVPTRLSPISILFI

SEQ ID NO: 463 - protein, 20 aa, Artificial Sequence
  Non-cyclic GFR-binding peptide
HVPKPSSVPTKLSPISILFI

SEQ ID NO: 464 - protein, 20 aa, Artificial Sequence
  Non-cyclic GFR-binding peptide
RVPSTSSVPTKTSPISILFI

SEQ ID NO: 465 - protein, 20 aa, Artificial Sequence
  Non-cyclic GFR-binding peptide
ASAAPSSVPTALSPISILFI

SEQ ID NO: 466 - protein, 20 aa, Artificial Sequence
  Non-cyclic GFR-binding peptide
ASASPSSVPTDLSPISILFI

SEQ ID NO: 467 - protein, 20 aa, Artificial Sequence
  Non-cyclic GFR-binding peptide
GIPEPSSVPEKMSPISILFI

SEQ ID NO: 468 - protein, 20 aa, Artificial Sequence
  Non-cyclic GFR-binding peptide
HVTKPTSAPTKLSPISILFI

SEQ ID NO: 469 - protein, 20 aa, Artificial Sequence
  Non-cyclic GFR-binding peptide
YVPKPSSAPTKLSPISILFI

SEQ ID NO: 470 - protein, 20 aa, Artificial Sequence
  Non-cyclic GFR-binding peptide
TVPKPSSAPTQLSPISILFI

SEQ ID NO: 471 - protein, 20 aa, Artificial Sequence
  Non-cyclic GFR-binding peptide
AVPKASSAPTKLSPISILFI

SEQ ID NO: 472 - protein, 20 aa, Artificial Sequence
  Non-cyclic GFR-binding peptide
GSAGPSSTPTKMSPISILFI

SEQ ID NO: 473 - protein, 20 aa, Artificial Sequence
  Non-cyclic GFR-binding peptide
AAPASSSVPARLSPISILFI

SEQ ID NO: 474 - protein, 20 aa, Artificial Sequence
  Non-cyclic GFR-binding peptide
HVPKPSSAPTKLSPISILFI

SEQ ID NO: 475 - protein, 20 aa, Artificial Sequence
  Non-cyclic GFR-binding peptide
RVPSTSSAPVKTSPISILFI

SEQ ID NO: 476 - protein, 20 aa, Artificial Sequence
  Non-cyclic GFR-binding peptide
ASAAPSSVPQALSPISILFI

SEQ ID NO: 477 - protein, 20 aa, Artificial Sequence
  Non-cyclic GFR-binding peptide
ASASPSSVSQDLSPISILFI

SEQ ID NO: 478 - protein, 20 aa, Artificial Sequence
  Non-cyclic GFR-binding peptide
ASASPSSVPQDLSPISILFI

SEQ ID NO: 479 - protein, 20 aa, Artificial Sequence
  Non-cyclic GFR-binding peptide
KIPKASSAPVELKPLSMLYV

SEQ ID NO: 480 - protein, 20 aa, Artificial Sequence
  Non-cyclic GFR-binding peptide
GIPEPSSAPVKMKPLSMLYV

SEQ ID NO: 481 - protein, 20 aa, Artificial Sequence
  Non-cyclic GFR-binding peptide
SIPKASSAPVELKPLSMLYV

SEQ ID NO: 482 - protein, 20 aa, Artificial Sequence
  Non-cyclic GFR-binding peptide
HVTKPTSAPVKLKPLSMLYV

SEQ ID NO: 483 - protein, 20 aa, Artificial Sequence
  Non-cyclic GFR-binding peptide
YVPKPSSAPVKLKPLSMLYV

SEQ ID NO: 484 - protein, 20 aa, Artificial Sequence
  Non-cyclic GFR-binding peptide
TVPKPSSAPVQLKPLSMLYV

SEQ ID NO: 485 - protein, 20 aa, Artificial Sequence
  Non-cyclic GFR-binding peptide
AVPKASSAPVKLKPLSMLYV

SEQ ID NO: 486 - protein, 20 aa, Artificial Sequence
  Non-cyclic GFR-binding peptide
KVGKASSAPVKLKPLSMLYV

SEQ ID NO: 487 - protein, 20 aa, Artificial Sequence
  Non-cyclic GFR-binding peptide
KASKASSAPVKLKPLSMLYV

SEQ ID NO: 488 - protein, 20 aa, Artificial Sequence
  Non-cyclic GFR-binding peptide
GSAGPSSAPVKMKPLSMLYV

SEQ ID NO: 489 - protein, 20 aa, Artificial Sequence
  Non-cyclic GFR-binding peptide
AAPASSSAPVRLKPLSMLYV

SEQ ID NO: 490 - protein, 20 aa, Artificial Sequence
  Non-cyclic GFR-binding peptide
STPPTSSAPVRLKPLSMLYV

SEQ ID NO: 491 - protein, 20 aa, Artificial Sequence
  Non-cyclic GFR-binding peptide
HVPKPSSAPVKLKPLSMLYV

SEQ ID NO: 492 - protein, 20 aa, Artificial Sequence
  Non-cyclic GFR-binding peptide
ASAAPSSAPVALKPLSMLYV

SEQ ID NO: 493 - protein, 20 aa, Artificial Sequence
  Non-cyclic GFR-binding peptide
ASASPSSAPVDLKPLSMLYV

SEQ ID NO: 494 - protein, 20 aa, Artificial Sequence
  Non-cyclic GFR-binding peptide
KIPKASSVPTELKPLSMLYV

SEQ ID NO: 495 - protein, 20 aa, Artificial Sequence
  Non-cyclic GFR-binding peptide
GIPEPSSVPEKMKPLSMLYV

SEQ ID NO: 496 - protein, 20 aa, Artificial Sequence
  Non-cyclic GFR-binding peptide
SIPKASSVPTELKPLSMLYV

SEQ ID NO: 497 - protein, 20 aa, Artificial Sequence
  Non-cyclic GFR-binding peptide
HVTKPTSAPTKLKPLSMLYV

SEQ ID NO: 498 - protein, 20 aa, Artificial Sequence
  Non-cyclic GFR-binding peptide
YVPKPSSAPTKLKPLSMLYV

SEQ ID NO: 499 - protein, 20 aa, Artificial Sequence
  Non-cyclic GFR-binding peptide
TVPKPSSAPTQLKPLSMLYV

SEQ ID NO: 500 - protein, 20 aa, Artificial Sequence
  Non-cyclic GFR-binding peptide
AVPKASSAPTKLKPLSMLYV

SEQ ID NO: 501 - protein, 20 aa, Artificial Sequence
  Non-cyclic GFR-binding peptide
KVGKASSVPTKLKPLSMLYV

SEQ ID NO: 502 - protein, 20 aa, Artificial Sequence
  Non-cyclic GFR-binding peptide
KASKASSVPTKLKPLSMLYV

SEQ ID NO: 503 - protein, 20 aa, Artificial Sequence
  Non-cyclic GFR-binding peptide
GSAGPSSTPTKMKPLSMLYV

SEQ ID NO: 504 - protein, 20 aa, Artificial Sequence
  Non-cyclic GFR-binding peptide
AAPASSSVPARLKPLSMLYV

SEQ ID NO: 505 - protein, 20 aa, Artificial Sequence
  Non-cyclic GFR-binding peptide
STPPTSSVPTRLKPLSMLYV

SEQ ID NO: 506 - protein, 20 aa, Artificial Sequence
  Non-cyclic GFR-binding peptide
HVPKPSSAPTKLKPLSMLYV

SEQ ID NO: 507 - protein, 20 aa, Artificial Sequence
  Non-cyclic GFR-binding peptide
ASAAPSSVPQALKPLSMLYV

SEQ ID NO: 508 - protein, 20 aa, Artificial Sequence
  Non-cyclic GFR-binding peptide
ASASPSSVSQDLKPLSMLYV

SEQ ID NO: 509 - protein, 20 aa, Artificial Sequence
  Non-cyclic GFR-binding peptide
ASASPSSVPQDLKPLSMLYV

SEQ ID NO: 510 - protein, 20 aa, Artificial Sequence
  Non-cyclic GFR-binding peptide
NDEGLESVPTEEKPLSMLYV

SEQ ID NO: 511 - protein, 20 aa, Artificial Sequence
  Non-cyclic GFR-binding peptide
NDEGLESVPTGQKPLSMLYV

SEQ ID NO: 512 - protein, 20 aa, Artificial Sequence
  Non-cyclic GFR-binding peptide
HVTKPTSVPQKLEPLPIVYY

SEQ ID NO: 513 - protein, 20 aa, Artificial Sequence
  Non-cyclic GFR-binding peptide
YVPKPSSVPQKLEPLPIVYY

SEQ ID NO: 514 - protein, 20 aa, Artificial Sequence
  Non-cyclic GFR-binding peptide
TVPKPSSVPQQLEPLPIVYY

SEQ ID NO: 515 - protein, 20 aa, Artificial Sequence
  Non-cyclic GFR-binding peptide
AVPKASSVPQKLEPLPIVYY

SEQ ID NO: 516 - protein, 20 aa, Artificial Sequence
  Non-cyclic GFR-binding peptide
GSAGPSSVPQKMEPLPIVYY

SEQ ID NO: 517 - protein, 20 aa, Artificial Sequence
  Non-cyclic GFR-binding peptide
AAPASSSVPQRLEPLPIVYY

SEQ ID NO: 518 - protein, 20 aa, Artificial Sequence
  Non-cyclic GFR-binding peptide
STPPTSSVPQRLEPLPIVYY

SEQ ID NO: 519 - protein, 20 aa, Artificial Sequence
  Non-cyclic GFR-binding peptide
HVPKPSSVPQKLEPLPIVYY

SEQ ID NO: 520 - protein, 20 aa, Artificial Sequence
  Non-cyclic GFR-binding peptide
RVPSTSSVPQKTEPLPIVYY

SEQ ID NO: 521 - protein, 20 aa, Artificial Sequence
  Non-cyclic GFR-binding peptide
ASASPSSVPQDLEPLPIVYY

SEQ ID NO: 522 - protein, 20 aa, Artificial Sequence
  Non-cyclic GFR-binding peptide
GIPEPSSVPEKMEPLPIVYY

SEQ ID NO: 523 - protein, 20 aa, Artificial Sequence
  Non-cyclic GFR-binding peptide
SIPKASSVPTELEPLPIVYY

SEQ ID NO: 524 - protein, 20 aa, Artificial Sequence
  Non-cyclic GFR-binding peptide
HVTKPTSAPTKLEPLPIVYY

SEQ ID NO: 525 - protein, 20 aa, Artificial Sequence
  Non-cyclic GFR-binding peptide
YVPKPSSAPTKLEPLPIVYY

SEQ ID NO: 526 - protein, 20 aa, Artificial Sequence
  Non-cyclic GFR-binding peptide
TVPKPSSAPTQLEPLPIVYY

SEQ ID NO: 527 - protein, 20 aa, Artificial Sequence
  Non-cyclic GFR-binding peptide
KVGKASSVPTKLEPLPIVYY

SEQ ID NO: 528 - protein, 20 aa, Artificial Sequence
  Non-cyclic GFR-binding peptide
KASKASSVPTKLEPLPIVYY

SEQ ID NO: 529 - protein, 20 aa, Artificial Sequence
  Non-cyclic GFR-binding peptide
GSAGPSSTPTKMEPLPIVYY

SEQ ID NO: 530 - protein, 20 aa, Artificial Sequence
  Non-cyclic GFR-binding peptide
AAPASSSVPARLEPLPIVYY

SEQ ID NO: 531 - protein, 20 aa, Artificial Sequence
  Non-cyclic GFR-binding peptide
STPPTSSVPTRLEPLPIVYY

SEQ ID NO: 532 - protein, 20 aa, Artificial Sequence
  Non-cyclic GFR-binding peptide
HVPKPSSAPTKLEPLPIVYY

SEQ ID NO: 533 - protein, 20 aa, Artificial Sequence
  Non-cyclic GFR-binding peptide
RVPSTSSAPVKTEPLPIVYY

SEQ ID NO: 534 - protein, 20 aa, Artificial Sequence
  Non-cyclic GFR-binding peptide
ASASPSSVSQDLEPLPIVYY

SEQ ID NO: 535 - protein, 20 aa, Artificial Sequence
  Non-cyclic GFR-binding peptide
NDEGLESVPTEEEPLPIVYY

SEQ ID NO: 536 - protein, 20 aa, Artificial Sequence
  Non-cyclic GFR-binding peptide
NDEGLESVPTGQEPLPIVYY

SEQ ID NO: 537 - protein, 20 aa, Artificial Sequence
  Non-cyclic GFR-binding peptide
SSVKSQPSRVHHEPLPIVYY

SEQ ID NO: 538 - protein, 20 aa, Artificial Sequence
  Non-cyclic GFR-binding peptide
RNVQSRPTQVQLEPLPIVYY

SEQ ID NO: 539 - protein, 20 aa, Artificial Sequence
  Non-cyclic GFR-binding peptide
GIPEPSSVSQKMEPLTILYY

SEQ ID NO: 540 - protein, 20 aa, Artificial Sequence
  Non-cyclic GFR-binding peptide
SIPKASSVSQELEPLTILYY

SEQ ID NO: 541 - protein, 20 aa, Artificial Sequence
  Non-cyclic GFR-binding peptide
HVTKPTSVSQKLEPLTILYY

SEQ ID NO: 542 - protein, 20 aa, Artificial Sequence
  Non-cyclic GFR-binding peptide
YVPKPSSVSQKLEPLTILYY

SEQ ID NO: 543 - protein, 20 aa, Artificial Sequence
  Non-cyclic GFR-binding peptide
TVPKPSSVSQQLEPLTILYY

SEQ ID NO: 544 - protein, 20 aa, Artificial Sequence
  Non-cyclic GFR-binding peptide
AVPKASSVSQKLEPLTILYY

SEQ ID NO: 545 - protein, 20 aa, Artificial Sequence
  Non-cyclic GFR-binding peptide
KASKASSVSQKLEPLTILYY

SEQ ID NO: 546 - protein, 20 aa, Artificial Sequence
  Non-cyclic GFR-binding peptide
GSAGPSSVSQKMEPLTILYY

SEQ ID NO: 547 - protein, 20 aa, Artificial Sequence
  Non-cyclic GFR-binding peptide
AAPASSSVSQRLEPLTILYY

SEQ ID NO: 548 - protein, 20 aa, Artificial Sequence
  Non-cyclic GFR-binding peptide
STPPTSSVSQRLEPLTILYY

SEQ ID NO: 549 - protein, 20 aa, Artificial Sequence
  Non-cyclic GFR-binding peptide
HVPKPSSVSQKLEPLTILYY

SEQ ID NO: 550 - protein, 20 aa, Artificial Sequence
  Non-cyclic GFR-binding peptide
RVPSTSSVSQKTEPLTILYY

SEQ ID NO: 551 - protein, 20 aa, Artificial Sequence
  Non-cyclic GFR-binding peptide
ASAAPSSVSQALEPLTILYY

SEQ ID NO: 552 - protein, 20 aa, Artificial Sequence
  Non-cyclic GFR-binding peptide
KIPKASSVPTELEPLTILYY

SEQ ID NO: 553 - protein, 20 aa, Artificial Sequence
  Non-cyclic GFR-binding peptide
GIPEPSSVPEKMEPLTILYY

SEQ ID NO: 554 - protein, 20 aa, Artificial Sequence
  Non-cyclic GFR-binding peptide
SIPKASSVPTELEPLTILYY

SEQ ID NO: 555 - protein, 20 aa, Artificial Sequence
  Non-cyclic GFR-binding peptide
HVTKPTSAPTKLEPLTILYY

SEQ ID NO: 556 - protein, 20 aa, Artificial Sequence
  Non-cyclic GFR-binding peptide
YVPKPSSAPTKLEPLTILYY

SEQ ID NO: 557 - protein, 20 aa, Artificial Sequence
  Non-cyclic GFR-binding peptide
TVPKPSSAPTQLEPLTILYY

SEQ ID NO: 558 - protein, 20 aa, Artificial Sequence
  Non-cyclic GFR-binding peptide
AVPKASSAPTKLEPLTILYY

SEQ ID NO: 559 - protein, 20 aa, Artificial Sequence
  Non-cyclic GFR-binding peptide
KASKASSVPTKLEPLTILYY

SEQ ID NO: 560 - protein, 20 aa, Artificial Sequence
  Non-cyclic GFR-binding peptide
GSAGPSSTPTKMEPLTILYY

SEQ ID NO: 561 - protein, 20 aa, Artificial Sequence
  Non-cyclic GFR-binding peptide
AAPASSSVPARLEPLTILYY

SEQ ID NO: 562 - protein, 20 aa, Artificial Sequence
  Non-cyclic GFR-binding peptide
STPPTSSVPTRLEPLTILYY

SEQ ID NO: 563 - protein, 20 aa, Artificial Sequence
  Non-cyclic GFR-binding peptide
HVPKPSSAPTKLEPLTILYY

SEQ ID NO: 564 - protein, 20 aa, Artificial Sequence
  Non-cyclic GFR-binding peptide
RVPSTSSAPVKTEPLTILYY

SEQ ID NO: 565 - protein, 20 aa, Artificial Sequence
  Non-cyclic GFR-binding peptide
NDEGLESVPTGQEPLTILYY

SEQ ID NO: 566 - protein, 20 aa, Artificial Sequence
  Non-cyclic GFR-binding peptide
SSVKSQPSRVHHEPLTILYY

SEQ ID NO: 567 - protein, 20 aa, Artificial Sequence
  Non-cyclic GFR-binding peptide
RNVQSRPTQVQLEPLTILYY

SEQ ID NO: 568 - protein, 20 aa, Artificial Sequence
  Non-cyclic GFR-binding peptide
KIPKASSVPQELEPLTILYY

SEQ ID NO: 569 - protein, 20 aa, Artificial Sequence
  Non-cyclic GFR-binding peptide
GIPEPSSVPQKMEPLTILYY

SEQ ID NO: 570 - protein, 20 aa, Artificial Sequence
  Non-cyclic GFR-binding peptide
SIPKASSVPQELEPLTILYY

SEQ ID NO: 571 - protein, 20 aa, Artificial Sequence
  Non-cyclic GFR-binding peptide
HVTKPTSVPQKLEPLTILYY

SEQ ID NO: 572 - protein, 20 aa, Artificial Sequence
  Non-cyclic GFR-binding peptide
YVPKPSSVPQKLEPLTILYY

SEQ ID NO: 573 - protein, 20 aa, Artificial Sequence
  Non-cyclic GFR-binding peptide
TVPKPSSVPQQLEPLTILYY

SEQ ID NO: 574 - protein, 20 aa, Artificial Sequence
  Non-cyclic GFR-binding peptide
AVPKASSVPQKLEPLTILYY

SEQ ID NO: 575 - protein, 20 aa, Artificial Sequence
  Non-cyclic GFR-binding peptide
KVGKASSVPQKLEPLTILYY

SEQ ID NO: 576 - protein, 20 aa, Artificial Sequence
  Non-cyclic GFR-binding peptide
KASKASSVPQKLEPLTILYY

SEQ ID NO: 577 - protein, 20 aa, Artificial Sequence
  Non-cyclic GFR-binding peptide
GSAGPSSVPQKMEPLTILYY

SEQ ID NO: 578 - protein, 20 aa, Artificial Sequence
  Non-cyclic GFR-binding peptide
AAPASSSVPQRLEPLTILYY

SEQ ID NO: 579 - protein, 20 aa, Artificial Sequence
  Non-cyclic GFR-binding peptide
STPPTSSVPQRLEPLTILYY

SEQ ID NO: 580 - protein, 20 aa, Artificial Sequence
  Non-cyclic GFR-binding peptide
HVPKPSSVPQKLEPLTILYY

SEQ ID NO: 581 - protein, 20 aa, Artificial Sequence
  Non-cyclic GFR-binding peptide
RVPSTSSVPQKTEPLTILYY

SEQ ID NO: 582 - protein, 20 aa, Artificial Sequence
  Non-cyclic GFR-binding peptide
NDEGLESVPTGQSNITMQIM

SEQ ID NO: 583 - protein, 20 aa, Artificial Sequence
  Non-cyclic GFR-binding peptide
GIPEPSSVPEKMSNITMQIM

SEQ ID NO: 584 - protein, 20 aa, Artificial Sequence
  Non-cyclic GFR-binding peptide
HVTKPTSAPTKLSNITMQIM

SEQ ID NO: 585 - protein, 20 aa, Artificial Sequence
  Non-cyclic GFR-binding peptide
YVPKPSSAPTKLSNITMQIM

SEQ ID NO: 586 - protein, 20 aa, Artificial Sequence
  Non-cyclic GFR-binding peptide
TVPKPSSAPTQLSNITMQIM

SEQ ID NO: 587 - protein, 20 aa, Artificial Sequence
  Non-cyclic GFR-binding peptide
AVPKASSAPTKLSNITMQIM

SEQ ID NO: 588 - protein, 20 aa, Artificial Sequence
  Non-cyclic GFR-binding peptide
HVPKPSSAPTKLSNITMQIM

SEQ ID NO: 589 - protein, 20 aa, Artificial Sequence
  Non-cyclic GFR-binding peptide
RVPSTSSAPVKTSNITMQIM

SEQ ID NO: 590 - protein, 20 aa, Artificial Sequence
  Non-cyclic GFR-binding peptide
ASAAPSSVPQALSNITMQIM

SEQ ID NO: 591 - protein, 20 aa, Artificial Sequence
  Non-cyclic GFR-binding peptide
ASASPSSVSQDLSNITMQIM

SEQ ID NO: 592 - protein, 20 aa, Artificial Sequence
  Non-cyclic GFR-binding peptide
ASASPSSVPQDLSNITMQIM

SEQ ID NO: 593 - protein, 20 aa, Artificial Sequence
  Non-cyclic GFR-binding peptide
SSVKSQPSRVHHSNITMQIM

SEQ ID NO: 594 - protein, 20 aa, Artificial Sequence
  Non-cyclic GFR-binding peptide
RNVQSRPTQVQLSNITMQIM

SEQ ID NO: 595 - protein, 20 aa, Artificial Sequence
  Non-cyclic GFR-binding peptide
RNVQSRPSRVQLRSVKVAKV

SEQ ID NO: 596 - protein, 20 aa, Artificial Sequence
  Non-cyclic GFR-binding peptide
KIPKASSVPTELRSVKVAKV

SEQ ID NO: 597 - protein, 20 aa, Artificial Sequence
  Non-cyclic GFR-binding peptide
GIPEPSSVPEKMRSVKVAKV

SEQ ID NO: 598 - protein, 20 aa, Artificial Sequence
  Non-cyclic GFR-binding peptide
YVPKPSSAPTKLRSVKVAKV

SEQ ID NO: 599 - protein, 20 aa, Artificial Sequence
  Non-cyclic GFR-binding peptide
AVPKASSAPTKLRSVKVAKV

SEQ ID NO: 600 - protein, 20 aa, Artificial Sequence
  Non-cyclic GFR-binding peptide
KVGKASSVPTKLRSVKVAKV

SEQ ID NO: 601 - protein, 20 aa, Artificial Sequence
  Non-cyclic GFR-binding peptide
KASKASSVPTKLRSVKVAKV

SEQ ID NO: 602 - protein, 20 aa, Artificial Sequence
  Non-cyclic GFR-binding peptide
GSAGPSSTPTKMRSVKVAKV

SEQ ID NO: 603 - protein, 20 aa, Artificial Sequence
  Non-cyclic GFR-binding peptide
AAPASSSVPARLRSVKVAKV

SEQ ID NO: 604 - protein, 20 aa, Artificial Sequence
  Non-cyclic GFR-binding peptide
STPPTSSVPTRLRSVKVAKV

SEQ ID NO: 605 - protein, 20 aa, Artificial Sequence
  Non-cyclic GFR-binding peptide
HVPKPSSAPTKLRSVKVAKV

SEQ ID NO: 606 - protein, 20 aa, Artificial Sequence
  Non-cyclic GFR-binding peptide
RVPSTSSAPVKTRSVKVAKV

SEQ ID NO: 607 - protein, 20 aa, Artificial Sequence
  Non-cyclic GFR-binding peptide
ASASPSSVSQDLRSVKVAKV

SEQ ID NO: 608 - protein, 20 aa, Artificial Sequence
  Non-cyclic GFR-binding peptide
NDEGLESVPTGQRSVKVAKV

SEQ ID NO: 609 - protein, 20 aa, Artificial Sequence
  Non-cyclic GFR-binding peptide
RNVQSRPTQVQLRSVKVAKV

SEQ ID NO: 610 - protein, 20 aa, Artificial Sequence
  Non-cyclic GFR-binding peptide
SSVKSQPTQVHHRPVQVRKI

SEQ ID NO: 611 - protein, 20 aa, Artificial Sequence
  Non-cyclic GFR-binding peptide
KIPKASSVPTELRPVQVRKI

SEQ ID NO: 612 - protein, 20 aa, Artificial Sequence
  Non-cyclic GFR-binding peptide
GIPEPSSVPEKMRPVQVRKI

SEQ ID NO: 613 - protein, 20 aa, Artificial Sequence
  Non-cyclic GFR-binding peptide
SIPKASSVPTELRPVQVRKI

SEQ ID NO: 614 - protein, 20 aa, Artificial Sequence
  Non-cyclic GFR-binding peptide
HVTKPTSAPTKLRPVQVRKI

SEQ ID NO: 615 - protein, 20 aa, Artificial Sequence
  Non-cyclic GFR-binding peptide
YVPKPSSAPTKLRPVQVRKI

SEQ ID NO: 616 - protein, 20 aa, Artificial Sequence
  Non-cyclic GFR-binding peptide
TVPKPSSAPTQLRPVQVRKI

SEQ ID NO: 617 - protein, 20 aa, Artificial Sequence
  Non-cyclic GFR-binding peptide
AVPKASSAPTKLRPVQVRKI

SEQ ID NO: 618 - protein, 20 aa, Artificial Sequence
  Non-cyclic GFR-binding peptide
KVGKASSVPTKLRPVQVRKI

SEQ ID NO: 619 - protein, 20 aa, Artificial Sequence
  Non-cyclic GFR-binding peptide
KASKASSVPTKLRPVQVRKI

SEQ ID NO: 620 - protein, 20 aa, Artificial Sequence
  Non-cyclic GFR-binding peptide
GSAGPSSTPTKMRPVQVRKI

SEQ ID NO: 621 - protein, 20 aa, Artificial Sequence
  Non-cyclic GFR-binding peptide
AAPASSSVPARLRPVQVRKI

SEQ ID NO: 622 - protein, 20 aa, Artificial Sequence
  Non-cyclic GFR-binding peptide
STPPTSSVPTRLRPVQVRKI

SEQ ID NO: 623 - protein, 20 aa, Artificial Sequence
  Non-cyclic GFR-binding peptide
HVPKPSSAPTKLRPVQVRKI

SEQ ID NO: 624 - protein, 20 aa, Artificial Sequence
  Non-cyclic GFR-binding peptide
RVPSTSSAPVKTRPVQVRKI

SEQ ID NO: 625 - protein, 20 aa, Artificial Sequence
  Non-cyclic GFR-binding peptide
ASASPSSVSQDLRPVQVRKI

SEQ ID NO: 626 - protein, 20 aa, Artificial Sequence
  Non-cyclic GFR-binding peptide
NDEGLESVPTGQRPVQVRKI

SEQ ID NO: 627 - protein, 20 aa, Artificial Sequence
  Non-cyclic GFR-binding peptide
SSVKSQPSRVHHRPVQVRKI

SEQ ID NO: 628 - protein, 8 aa, Artificial Sequence
  Non-cyclic GFR-binding peptide
SAISILYL

SEQ ID NO: 629 - protein, 8 aa, Artificial Sequence
  Non-cyclic GFR-binding peptide
SAISVLYL

SEQ ID NO: 630 - protein, 8 aa, Artificial Sequence
  Non-cyclic GFR-binding peptide
SSLSMLFF

SEQ ID NO: 631 - protein, 8 aa, Artificial Sequence
  Non-cyclic GFR-binding peptide
SSLSVLFF

SEQ ID NO: 632 - protein, 8 aa, Artificial Sequence
  Non-cyclic GFR-binding peptide
NAISMLYF

SEQ ID NO: 633 - protein, 8 aa, Artificial Sequence
  Non-cyclic GFR-binding peptide
NAISILYF

SEQ ID NO: 634 - protein, 8 aa, Artificial Sequence
  Non-cyclic GFR-binding peptide
SATSMLYY

SEQ ID NO: 635 - protein, 8 aa, Artificial Sequence
  Non-cyclic GFR-binding peptide
SATSILYY

SEQ ID NO: 636 - protein, 8 aa, Artificial Sequence
  Non-cyclic GFR-binding peptide
SPISMLYK

SEQ ID NO: 637 - protein, 8 aa, Artificial Sequence
  Non-cyclic GFR-binding peptide
SPISILYK

SEQ ID NO: 638 - protein, 8 aa, Artificial Sequence
  Non-cyclic GFR-binding peptide
EPISMLYL

SEQ ID NO: 639 - protein, 8 aa, Artificial Sequence
  Non-cyclic GFR-binding peptide
EPISVLYL

SEQ ID NO: 640 - protein, 8 aa, Artificial Sequence
  Non-cyclic GFR-binding peptide
SPINILYF

SEQ ID NO: 641 - protein, 8 aa, Artificial Sequence
  Non-cyclic GFR-binding peptide
SPINVLYF

SEQ ID NO: 642 - protein, 8 aa, Artificial Sequence
  Non-cyclic GFR-binding peptide
SPISMLYI

SEQ ID NO: 643 - protein, 8 aa, Artificial Sequence
  Non-cyclic GFR-binding peptide
SPISVLYI

SEQ ID NO: 644 - protein, 8 aa, Artificial Sequence
  Non-cyclic GFR-binding peptide
SPISMLFI

SEQ ID NO: 645 - protein, 8 aa, Artificial Sequence
  Non-cyclic GFR-binding peptide
SPISVLFI

SEQ ID NO: 646 - protein, 8 aa, Artificial Sequence
  Non-cyclic GFR-binding peptide
KPLSILYV

SEQ ID NO: 647 - protein, 8 aa, Artificial Sequence
  Non-cyclic GFR-binding peptide
KPLSVLYV

SEQ ID NO: 648 - protein, 8 aa, Artificial Sequence
  Non-cyclic GFR-binding peptide
EPLPMVYY

SEQ ID NO: 649 - protein, 8 aa, Artificial Sequence
  Non-cyclic GFR-binding peptide
EPLPVVYY

SEQ ID NO: 650 - protein, 8 aa, Artificial Sequence
  Non-cyclic GFR-binding peptide
EPLTMLYY

SEQ ID NO: 651 - protein, 8 aa, Artificial Sequence
  Non-cyclic GFR-binding peptide
EPLTVLYY

SEQ ID NO: 652 - protein, 8 aa, Artificial Sequence
  Non-cyclic GFR-binding peptide
SNITIQIM

SEQ ID NO: 653 - protein, 8 aa, Artificial Sequence
  Non-cyclic GFR-binding peptide
SNITVQIM

SEQ ID NO: 654 - protein, 8 aa, Artificial Sequence
  Non-cyclic GFR-binding peptide
RSVKMAKV

SEQ ID NO: 655 - protein, 8 aa, Artificial Sequence
  Non-cyclic GFR-binding peptide
RSVKIAKV

SEQ ID NO: 656 - protein, 8 aa, Artificial Sequence
  Non-cyclic GFR-binding peptide
RPVQMRKI

SEQ ID NO: 657 - protein, 8 aa, Artificial Sequence
  Non-cyclic GFR-binding peptide
RPVQIRKI

SEQ ID NO: 658 - protein, 20 aa, Artificial Sequence
  Non-cyclic GFR-binding peptide
LYLMSIASMKTPVSSPGASG

SEQ ID NO: 659 - protein, 20 aa, Artificial Sequence
  Non-cyclic GFR-binding peptide
LYLMSIASLRTPVSSSAPAA

SEQ ID NO: 660 - protein, 20 aa, Artificial Sequence
  Non-cyclic GFR-binding peptide
LYLMSIASLRTPVSSTPPTS

SEQ ID NO: 661 - protein, 20 aa, Artificial Sequence
  Non-cyclic GFR-binding peptide
FYLVSIANEETPASELGEDN

SEQ ID NO: 662 - protein, 20 aa, Artificial Sequence
  Non-cyclic GFR-binding peptide
FYLVSIANQGTPASELGEDN

SEQ ID NO: 663 - protein, 20 aa, Artificial Sequence
  Non-cyclic GFR-binding peptide
YYLVSTASLETPVSSAKPIK

SEQ ID NO: 664 - protein, 20 aa, Artificial Sequence
  Non-cyclic GFR-binding peptide
YYLVSTASMKEPVSSPEPIG

SEQ ID NO: 665 - protein, 20 aa, Artificial Sequence
  Non-cyclic GFR-binding peptide
KYLVSIPSMKTPVSSPGASG

SEQ ID NO: 666 - protein, 20 aa, Artificial Sequence
  Non-cyclic GFR-binding peptide
FYLVSIANLQVQTPRSQVNR

SEQ ID NO: 667 - protein, 20 aa, Artificial Sequence
  Non-cyclic GFR-binding peptide
LYLMSIASLKTPASSPKPVH

SEQ ID NO: 668 - protein, 20 aa, Artificial Sequence
  Non-cyclic GFR-binding peptide
LYLMSIASLQVQTPRSQVNR

SEQ ID NO: 669 - protein, 20 aa, Artificial Sequence
  Non-cyclic GFR-binding peptide
LYLMSIASLDQSVSSPSASA

SEQ ID NO: 670 - protein, 20 aa, Artificial Sequence
  Non-cyclic GFR-binding peptide
KYLVSIPSLKTPVSSPKPVH

SEQ ID NO: 671 - protein, 20 aa, Artificial Sequence
  Non-cyclic GFR-binding peptide
FYLVSIANQGTPVSELGEDN

SEQ ID NO: 672 - protein, 20 aa, Artificial Sequence
  Non-cyclic GFR-binding peptide
LYLMSIASLKTPVSSAKGGG

SEQ ID NO: 673 - protein, 24 aa, Artificial Sequence
  Non-cyclic GFR-binding peptide
LYLMSIASMKTPTSSPGASGWFWW

SEQ ID NO: 674 - protein, 25 aa, Artificial Sequence
  Non-cyclic GFR-binding peptide
LYLMSIASLKTPVSTPKTVHPGPTG

SEQ ID NO: 675 - protein, 18 aa, Artificial Sequence
  Non-cyclic GFR-binding peptide
YYLITLPELEQPVPGPTG

SEQ ID NO: 676 - protein, 18 aa, Artificial Sequence
  Non-cyclic GFR-binding peptide
KYLVSIPSLETPVPGPTG

SEQ ID NO: 677 - protein, 21 aa, Artificial Sequence
  Non-cyclic GFR-binding peptide
LYLMSIASLKTPVSSAPGPTG

SEQ ID NO: 678 - protein, 18 aa, Artificial Sequence
  Non-cyclic GFR-binding peptide
LYLMSIASQGTPVPGPTG

SEQ ID NO: 679 - protein, 18 aa, Artificial Sequence
  Non-cyclic GFR-binding peptide
LYLMSIASEETPVPGPTG

SEQ ID NO: 680 - protein, 21 aa, Artificial Sequence
  Non-cyclic GFR-binding peptide
KYLVSIPSLKTPVSTPPGPTG

SEQ ID NO: 681 - protein, 21 aa, Artificial Sequence
  Non-cyclic GFR-binding peptide
KYLVSIPSLKTPVSSPPGPTG

SEQ ID NO: 682 - protein, 25 aa, Artificial Sequence
  Non-cyclic GFR-binding peptide
FYLVSIANQGTPASELGEDNPGPTG

SEQ ID NO: 683 - protein, 25 aa, Artificial Sequence
  Non-cyclic GFR-binding peptide
KYLVSIPSLRTPVSSSAPAAGWFWW

SEQ ID NO: 684 - protein, 25 aa, Artificial Sequence
  Non-cyclic GFR-binding peptide
LYLMSIASLKTPVSSAKSAKGWFWW

SEQ ID NO: 685 - protein, 25 aa, Artificial Sequence
  Non-cyclic GFR-binding peptide
LYLMSIASMKTPTSSPGASGPGPTG

SEQ ID NO: 686 - protein, 25 aa, Artificial Sequence
  Non-cyclic GFR-binding peptide
LYLMSIASLRAPVSSSAPAAPGPTG

SEQ ID NO: 687 - protein, 20 aa, Artificial Sequence
  Non-cyclic GFR-binding peptide
YYVIPLPELKTPASSAKPVA

SEQ ID NO: 688 - protein, 20 aa, Artificial Sequence
  Non-cyclic GFR-binding peptide
YYLITLPELEQSVSSAKPIK

SEQ ID NO: 689 - protein, 20 aa, Artificial Sequence
  Non-cyclic GFR-binding peptide
VKAVKVSRLRVRSSSTPPTS

SEQ ID NO: 690 - protein, 20 aa, Artificial Sequence
  Non-cyclic GFR-binding peptide
MIQMTINSLKTPVSSAKGVK

SEQ ID NO: 691 - protein, 20 aa, Artificial Sequence
  Non-cyclic GFR-binding peptide
IKRVQVPRLDVQTSSPSASA

SEQ ID NO: 692 - protein, 20 aa, Artificial Sequence
  Non-cyclic GFR-binding peptide
FFLISLSSLKEPVSSAKSAA

SEQ ID NO: 693 - protein, 20 aa, Artificial Sequence
  Non-cyclic GFR-binding peptide
FFLISLSSMKEPVSSPGASG

SEQ ID NO: 694 - protein, 20 aa, Artificial Sequence
  Non-cyclic GFR-binding peptide
IYLISIPSTKAPVSSTSPVR

SEQ ID NO: 695 - protein, 20 aa, Artificial Sequence
  Non-cyclic GFR-binding peptide
IYLISIPSLAAPVSSPAASA

SEQ ID NO: 696 - protein, 20 aa, Artificial Sequence
  Non-cyclic GFR-binding peptide
IYLISIPSEEAPVSELGEDN

SEQ ID NO: 697 - protein, 13 aa, Artificial Sequence
  Non-cyclic GFR-binding peptide
IYLISIPSQGAPV

SEQ ID NO: 698 - protein, 13 aa, Artificial Sequence
  Non-cyclic GFR-binding peptide
IYLISIPSEEAPV

SEQ ID NO: 699 - protein, 20 aa, Artificial Sequence
  Non-cyclic GFR-binding peptide
IYLISIPSMKAPVSSPEPIG

SEQ ID NO: 700 - protein, 20 aa, Artificial Sequence
  Non-cyclic GFR-binding peptide
IKRVQVPRLAQPVSSPAASA

SEQ ID NO: 701 - protein, 18 aa, Artificial Sequence
  Non-cyclic GFR-binding peptide
IKRVQVPRLDQSVSSPSA

SEQ ID NO: 702 - protein, 20 aa, Artificial Sequence
  Non-cyclic GFR-binding peptide
IKRVQVPRLDQPVSSPSASA

SEQ ID NO: 703 - protein, 20 aa, Artificial Sequence
  Non-cyclic GFR-binding peptide
IKRVQVPREETPVSELGEDN

SEQ ID NO: 704 - protein, 8 aa, Artificial Sequence
  Non-cyclic GFR-binding peptide
IKRVQVPR

SEQ ID NO: 705 - protein, 20 aa, Artificial Sequence
  Non-cyclic GFR-binding peptide
MIQMTINSLQTPVSSPKPVT

SEQ ID NO: 706 - protein, 20 aa, Artificial Sequence
  Non-cyclic GFR-binding peptide
MIQMTINSLKTPVSSAKSAK

SEQ ID NO: 707 - protein, 20 aa, Artificial Sequence
  Non-cyclic GFR-binding peptide
MIQMTINSMKTPTSSPGASG

SEQ ID NO: 708 - protein, 20 aa, Artificial Sequence
  Non-cyclic GFR-binding peptide
MIQMTINSLRAPVSSSAPAA

SEQ ID NO: 709 - protein, 20 aa, Artificial Sequence
  Non-cyclic GFR-binding peptide
YYLVSTASLDTPASSPSASA

SEQ ID NO: 710 - protein, 20 aa, Artificial Sequence
  Non-cyclic GFR-binding peptide
VKAVKVSRLETPVSSAKPIS

SEQ ID NO: 711 - protein, 20 aa, Artificial Sequence
  Non-cyclic GFR-binding peptide
VKAVKVSRLKTPASTPKTVH

SEQ ID NO: 712 - protein, 20 aa, Artificial Sequence
  Non-cyclic GFR-binding peptide
IKRVQVPRLEVQTSSAKPIS

SEQ ID NO: 713 - protein, 20 aa, Artificial Sequence
  Non-cyclic GFR-binding peptide
IYLISIPSEETPVSELGEDN

SEQ ID NO: 714 - protein, 20 aa, Artificial Sequence
  Non-cyclic GFR-binding peptide
IYLISIPSHHVRSPQSKVVV

SEQ ID NO: 715 - protein, 20 aa, Artificial Sequence
  Non-cyclic GFR-binding peptide
LYLISIPETKVPASSTSPVR

SEQ ID NO: 716 - protein, 20 aa, Artificial Sequence
  Non-cyclic GFR-binding peptide
LYLMSIASMKTPVSSPEPIG

SEQ ID NO: 717 - protein, 20 aa, Artificial Sequence
  Non-cyclic GFR-binding peptide
LYLMSIASLKTPVSTPKTVH

SEQ ID NO: 718 - protein, 20 aa, Artificial Sequence
  Non-cyclic GFR-binding peptide
LYLMSIASLKTPVSSPKPVY

SEQ ID NO: 719 - protein, 20 aa, Artificial Sequence
  Non-cyclic GFR-binding peptide
LYLMSIASLQTPVSSPKPVT

SEQ ID NO: 720 - protein, 20 aa, Artificial Sequence
  Non-cyclic GFR-binding peptide
LYLMSIASLKTPVSSAKPVA

SEQ ID NO: 721 - protein, 20 aa, Artificial Sequence
  Non-cyclic GFR-binding peptide
LYLMSIASLKTPVSSAKSAK

SEQ ID NO: 722 - protein, 20 aa, Artificial Sequence
  Non-cyclic GFR-binding peptide
LYLMSIASLKTPVSSPKPVH

SEQ ID NO: 723 - protein, 20 aa, Artificial Sequence
  Non-cyclic GFR-binding peptide
LYLMSIASLATPVSSPAASA

SEQ ID NO: 724 - protein, 20 aa, Artificial Sequence
  Non-cyclic GFR-binding peptide
LYLMSIASLDTPVSSPSASA

SEQ ID NO: 725 - protein, 20 aa, Artificial Sequence
  Non-cyclic GFR-binding peptide
LYLMSIASMKEPVSSPEPIG

SEQ ID NO: 726 - protein, 20 aa, Artificial Sequence
  Non-cyclic GFR-binding peptide
LYLMSIASLKTPASTPKTVH

SEQ ID NO: 727 - protein, 20 aa, Artificial Sequence
  Non-cyclic GFR-binding peptide
LYLMSIASLKTPASSPKPVY

SEQ ID NO: 728 - protein, 20 aa, Artificial Sequence
  Non-cyclic GFR-binding peptide
LYLMSIASMKTPTSSPGASG

SEQ ID NO: 729 - protein, 20 aa, Artificial Sequence
  Non-cyclic GFR-binding peptide
LYLMSIASLRAPVSSSAPAA

SEQ ID NO: 730 - protein, 20 aa, Artificial Sequence
  Non-cyclic GFR-binding peptide
LYLMSIASTKVPASSTSPVR

SEQ ID NO: 731 - protein, 20 aa, Artificial Sequence
  Non-cyclic GFR-binding peptide
LYLMSIASLAQPVSSPAASA

SEQ ID NO: 732 - protein, 20 aa, Artificial Sequence
  Non-cyclic GFR-binding peptide
LYLMSIASLDQPVSSPSASA

SEQ ID NO: 733 - protein, 20 aa, Artificial Sequence
  Non-cyclic GFR-binding peptide
LYLMSIASHHVRSPQSKVSS

SEQ ID NO: 734 - protein, 20 aa, Artificial Sequence
  Non-cyclic GFR-binding peptide
FFLISLSSLEEPVSSAKPIK

SEQ ID NO: 735 - protein, 20 aa, Artificial Sequence
  Non-cyclic GFR-binding peptide
FFLISLSSLEEPVSSAKPIS

SEQ ID NO: 736 - protein, 20 aa, Artificial Sequence
  Non-cyclic GFR-binding peptide
FFLISLSSLKEPVSSPKPVY

SEQ ID NO: 737 - protein, 20 aa, Artificial Sequence
  Non-cyclic GFR-binding peptide
FFLISLSSLQEPVSSPKPVT

SEQ ID NO: 738 - protein, 20 aa, Artificial Sequence
  Non-cyclic GFR-binding peptide
FFLISLSSLKEPVSSAKPVA

SEQ ID NO: 739 - protein, 20 aa, Artificial Sequence
  Non-cyclic GFR-binding peptide
FFLISLSSLKEPVSSAKGVK

SEQ ID NO: 740 - protein, 20 aa, Artificial Sequence
  Non-cyclic GFR-binding peptide
FFLISLSSLKEPVSSAKSAK

SEQ ID NO: 741 - protein, 20 aa, Artificial Sequence
  Non-cyclic GFR-binding peptide
FFLISLSSLREPVSSSAPAA

SEQ ID NO: 742 - protein, 20 aa, Artificial Sequence
  Non-cyclic GFR-binding peptide
FFLISLSSLREPVSSTPPTS

SEQ ID NO: 743 - protein, 20 aa, Artificial Sequence
  Non-cyclic GFR-binding peptide
FFLISLSSLKEPVSSPKPVH

SEQ ID NO: 744 - protein, 20 aa, Artificial Sequence
  Non-cyclic GFR-binding peptide
FFLISLSSTKEPVSSTSPVR

SEQ ID NO: 745 - protein, 20 aa, Artificial Sequence
  Non-cyclic GFR-binding peptide
FFLISLSSLAEPVSSPAASA

SEQ ID NO: 746 - protein, 20 aa, Artificial Sequence
  Non-cyclic GFR-binding peptide
FFLISLSSLDEPVSSPSASA

SEQ ID NO: 747 - protein, 20 aa, Artificial Sequence
  Non-cyclic GFR-binding peptide
FFLISLSSLETPVSSAKPIK

SEQ ID NO: 748 - protein, 20 aa, Artificial Sequence
  Non-cyclic GFR-binding peptide
FFLISLSSLETPVSSAKPIS

SEQ ID NO: 749 - protein, 20 aa, Artificial Sequence
  Non-cyclic GFR-binding peptide
FFLISLSSLKTPASTPKTVH

SEQ ID NO: 750 - protein, 20 aa, Artificial Sequence
  Non-cyclic GFR-binding peptide
FFLISLSSLKTPASSPKPVY

SEQ ID NO: 751 - protein, 20 aa, Artificial Sequence
  Non-cyclic GFR-binding peptide
FFLISLSSLQTPASSPKPVT

SEQ ID NO: 752 - protein, 20 aa, Artificial Sequence
  Non-cyclic GFR-binding peptide
FFLISLSSLKTPASSAKPVA

SEQ ID NO: 753 - protein, 20 aa, Artificial Sequence
  Non-cyclic GFR-binding peptide
FFLISLSSLKTPVSSAKGVK

SEQ ID NO: 754 - protein, 20 aa, Artificial Sequence
  Non-cyclic GFR-binding peptide
FFLISLSSLKTPVSSAKSAK

SEQ ID NO: 755 - protein, 20 aa, Artificial Sequence
  Non-cyclic GFR-binding peptide
FFLISLSSMKTPTSSPGASG

SEQ ID NO: 756 - protein, 20 aa, Artificial Sequence
  Non-cyclic GFR-binding peptide
FFLISLSSLRAPVSSSAPAA

SEQ ID NO: 757 - protein, 20 aa, Artificial Sequence
  Non-cyclic GFR-binding peptide
FFLISLSSLRTPVSSTPPTS

SEQ ID NO: 758 - protein, 20 aa, Artificial Sequence
  Non-cyclic GFR-binding peptide
FFLISLSSLKTPASSPKPVH

SEQ ID NO: 759 - protein, 20 aa, Artificial Sequence
  Non-cyclic GFR-binding peptide
FFLISLSSTKVPASSTSPVR

SEQ ID NO: 760 - protein, 20 aa, Artificial Sequence
  Non-cyclic GFR-binding peptide
FFLISLSSLDQPVSSPSASA

SEQ ID NO: 761 - protein, 20 aa, Artificial Sequence
  Non-cyclic GFR-binding peptide
FFLISLSSQGTPVSELGEDN

SEQ ID NO: 762 - protein, 20 aa, Artificial Sequence
  Non-cyclic GFR-binding peptide
FFLISLSSHHVRSPQSKVSS

SEQ ID NO: 763 - protein, 20 aa, Artificial Sequence
  Non-cyclic GFR-binding peptide
FFLISLSSLQVQTPRSQVNR

SEQ ID NO: 764 - protein, 20 aa, Artificial Sequence
  Non-cyclic GFR-binding peptide
FYLVSIANLETPASSAKPIK

SEQ ID NO: 765 - protein, 20 aa, Artificial Sequence
  Non-cyclic GFR-binding peptide
FYLVSIANMKTPASSPEPIG

SEQ ID NO: 766 - protein, 20 aa, Artificial Sequence
  Non-cyclic GFR-binding peptide
FYLVSIANLETPASSAKPIS

SEQ ID NO: 767 - protein, 20 aa, Artificial Sequence
  Non-cyclic GFR-binding peptide
FYLVSIANLKTPASSAKPVA

SEQ ID NO: 768 - protein, 20 aa, Artificial Sequence
  Non-cyclic GFR-binding peptide
FYLVSIANLKTPASSAKGVK

SEQ ID NO: 769 - protein, 20 aa, Artificial Sequence
  Non-cyclic GFR-binding peptide
FYLVSIANLKTPASSAKSAK

SEQ ID NO: 770 - protein, 20 aa, Artificial Sequence
  Non-cyclic GFR-binding peptide
FYLVSIANMKTPASSPGASG

SEQ ID NO: 771 - protein, 20 aa, Artificial Sequence
  Non-cyclic GFR-binding peptide
FYLVSIANLRTPASSSAPAA

SEQ ID NO: 772 - protein, 20 aa, Artificial Sequence
  Non-cyclic GFR-binding peptide
FYLVSIANLRTPASSTPPTS

SEQ ID NO: 773 - protein, 20 aa, Artificial Sequence
  Non-cyclic GFR-binding peptide
FYLVSIANTKTPASSTSPVR

SEQ ID NO: 774 - protein, 20 aa, Artificial Sequence
  Non-cyclic GFR-binding peptide
FYLVSIANLATPASSPAASA

SEQ ID NO: 775 - protein, 20 aa, Artificial Sequence
  Non-cyclic GFR-binding peptide
FYLVSIANLDTPASSPSASA

SEQ ID NO: 776 - protein, 20 aa, Artificial Sequence
  Non-cyclic GFR-binding peptide
FYLVSIANLETPVSSAKPIK

SEQ ID NO: 777 - protein, 20 aa, Artificial Sequence
  Non-cyclic GFR-binding peptide
FYLVSIANMKEPVSSPEPIG

SEQ ID NO: 778 - protein, 20 aa, Artificial Sequence
  Non-cyclic GFR-binding peptide
FYLVSIANLETPVSSAKPIS

SEQ ID NO: 779 - protein, 20 aa, Artificial Sequence
  Non-cyclic GFR-binding peptide
FYLVSIANLKTPVSSAKGVK

SEQ ID NO: 780 - protein, 20 aa, Artificial Sequence
  Non-cyclic GFR-binding peptide
FYLVSIANLKTPVSSAKSAK

SEQ ID NO: 781 - protein, 20 aa, Artificial Sequence
  Non-cyclic GFR-binding peptide
FYLVSIANMKTPTSSPGASG

SEQ ID NO: 782 - protein, 20 aa, Artificial Sequence
  Non-cyclic GFR-binding peptide
FYLVSIANLRAPVSSSAPAA

SEQ ID NO: 783 - protein, 20 aa, Artificial Sequence
  Non-cyclic GFR-binding peptide
FYLVSIANLRTPVSSTPPTS

SEQ ID NO: 784 - protein, 20 aa, Artificial Sequence
  Non-cyclic GFR-binding peptide
FYLVSIANTKVPASSTSPVR

SEQ ID NO: 785 - protein, 20 aa, Artificial Sequence
  Non-cyclic GFR-binding peptide
FYLVSIANLAQPVSSPAASA

SEQ ID NO: 786 - protein, 20 aa, Artificial Sequence
  Non-cyclic GFR-binding peptide
FYLVSIANLDQSVSSPSASA

SEQ ID NO: 787 - protein, 20 aa, Artificial Sequence
  Non-cyclic GFR-binding peptide
FYLVSIANLDQPVSSPSASA

SEQ ID NO: 788 - protein, 20 aa, Artificial Sequence
  Non-cyclic GFR-binding peptide
FYLVSIANEETPVSELGEDN

SEQ ID NO: 789 - protein, 20 aa, Artificial Sequence
  Non-cyclic GFR-binding peptide
FYLVSIANHHVRSPQSKVSS

SEQ ID NO: 790 - protein, 20 aa, Artificial Sequence
  Non-cyclic GFR-binding peptide
YYLVSTASLETPASSAKPIK

SEQ ID NO: 791 - protein, 20 aa, Artificial Sequence
  Non-cyclic GFR-binding peptide
YYLVSTASMKTPASSPEPIG

SEQ ID NO: 792 - protein, 20 aa, Artificial Sequence
  Non-cyclic GFR-binding peptide
YYLVSTASLETPASSAKPIS

SEQ ID NO: 793 - protein, 20 aa, Artificial Sequence
  Non-cyclic GFR-binding peptide
YYLVSTASLKTPASTPKTVH

SEQ ID NO: 794 - protein, 20 aa, Artificial Sequence
  Non-cyclic GFR-binding peptide
YYLVSTASLKTPASSPKPVY

SEQ ID NO: 795 - protein, 20 aa, Artificial Sequence
  Non-cyclic GFR-binding peptide
YYLVSTASLQTPASSPKPVT

SEQ ID NO: 796 - protein, 20 aa, Artificial Sequence
  Non-cyclic GFR-binding peptide
YYLVSTASLKTPASSAKGVK

SEQ ID NO: 797 - protein, 20 aa, Artificial Sequence
  Non-cyclic GFR-binding peptide
YYLVSTASLKTPASSAKSAK

SEQ ID NO: 798 - protein, 20 aa, Artificial Sequence
  Non-cyclic GFR-binding peptide
YYLVSTASMKTPASSPGASG

SEQ ID NO: 799 - protein, 20 aa, Artificial Sequence
  Non-cyclic GFR-binding peptide
YYLVSTASLRTPASSSAPAA

SEQ ID NO: 800 - protein, 20 aa, Artificial Sequence
  Non-cyclic GFR-binding peptide
YYLVSTASLRTPASSTPPTS

SEQ ID NO: 801 - protein, 20 aa, Artificial Sequence
  Non-cyclic GFR-binding peptide
YYLVSTASLKTPASSPKPVH

SEQ ID NO: 802 - protein, 20 aa, Artificial Sequence
  Non-cyclic GFR-binding peptide
YYLVSTASLETPVSSAKPIS

SEQ ID NO: 803 - protein, 20 aa, Artificial Sequence
  Non-cyclic GFR-binding peptide
YYLVSTASLKTPVSSAKGVK

SEQ ID NO: 804 - protein, 20 aa, Artificial Sequence
  Non-cyclic GFR-binding peptide
YYLVSTASLKTPVSSAKSAK

SEQ ID NO: 805 - protein, 20 aa, Artificial Sequence
  Non-cyclic GFR-binding peptide
YYLVSTASMKTPTSSPGASG

SEQ ID NO: 806 - protein, 20 aa, Artificial Sequence
  Non-cyclic GFR-binding peptide
YYLVSTASLRAPVSSSAPAA

SEQ ID NO: 807 - protein, 20 aa, Artificial Sequence
  Non-cyclic GFR-binding peptide
YYLVSTASLRTPVSSTPPTS

SEQ ID NO: 808 - protein, 20 aa, Artificial Sequence
  Non-cyclic GFR-binding peptide
YYLVSTASTKVPASSTSPVR

SEQ ID NO: 809 - protein, 20 aa, Artificial Sequence
  Non-cyclic GFR-binding peptide
YYLVSTASLAQPVSSPAASA

SEQ ID NO: 810 - protein, 20 aa, Artificial Sequence
  Non-cyclic GFR-binding peptide
YYLVSTASLDQSVSSPSASA

SEQ ID NO: 811 - protein, 20 aa, Artificial Sequence
  Non-cyclic GFR-binding peptide
YYLVSTASLDQPVSSPSASA

SEQ ID NO: 812 - protein, 20 aa, Artificial Sequence
  Non-cyclic GFR-binding peptide
YYLVSTASEETPVSELGEDN

SEQ ID NO: 813 - protein, 20 aa, Artificial Sequence
  Non-cyclic GFR-binding peptide
YYLVSTASQGTPVSELGEDN

SEQ ID NO: 814 - protein, 20 aa, Artificial Sequence
  Non-cyclic GFR-binding peptide
YYLVSTASHHVRSPQSKVSS

SEQ ID NO: 815 - protein, 20 aa, Artificial Sequence
  Non-cyclic GFR-binding peptide
YYLVSTASLQVQTPRSQVNR

SEQ ID NO: 816 - protein, 20 aa, Artificial Sequence
  Non-cyclic GFR-binding peptide
KYLVSIPSMKTPVSSPEPIG

SEQ ID NO: 817 - protein, 20 aa, Artificial Sequence
  Non-cyclic GFR-binding peptide
KYLVSIPSLETPVSSAKPIS

SEQ ID NO: 818 - protein, 20 aa, Artificial Sequence
  Non-cyclic GFR-binding peptide
KYLVSIPSLKTPVSTPKTVH

SEQ ID NO: 819 - protein, 20 aa, Artificial Sequence
  Non-cyclic GFR-binding peptide
KYLVSIPSLKTPVSSPKPVY

SEQ ID NO: 820 - protein, 20 aa, Artificial Sequence
  Non-cyclic GFR-binding peptide
KYLVSIPSLQTPVSSPKPVT

SEQ ID NO: 821 - protein, 20 aa, Artificial Sequence
  Non-cyclic GFR-binding peptide
KYLVSIPSLKTPVSSAKPVA

SEQ ID NO: 822 - protein, 20 aa, Artificial Sequence
  Non-cyclic GFR-binding peptide
KYLVSIPSLKTPVSSAKSAK

SEQ ID NO: 823 - protein, 20 aa, Artificial Sequence
  Non-cyclic GFR-binding peptide
KYLVSIPSLRTPVSSSAPAA

SEQ ID NO: 824 - protein, 20 aa, Artificial Sequence
  Non-cyclic GFR-binding peptide
KYLVSIPSLRTPVSSTPPTS

SEQ ID NO: 825 - protein, 20 aa, Artificial Sequence
  Non-cyclic GFR-binding peptide
KYLVSIPSTKTPVSSTSPVR

SEQ ID NO: 826 - protein, 20 aa, Artificial Sequence
  Non-cyclic GFR-binding peptide
KYLVSIPSLATPVSSPAASA

SEQ ID NO: 827 - protein, 20 aa, Artificial Sequence
  Non-cyclic GFR-binding peptide
KYLVSIPSLDTPVSSPSASA

SEQ ID NO: 828 - protein, 20 aa, Artificial Sequence
  Non-cyclic GFR-binding peptide
KYLVSIPSMKEPVSSPEPIG

SEQ ID NO: 829 - protein, 20 aa, Artificial Sequence
  Non-cyclic GFR-binding peptide
KYLVSIPSLKTPASTPKTVH

SEQ ID NO: 830 - protein, 20 aa, Artificial Sequence
  Non-cyclic GFR-binding peptide
KYLVSIPSLKTPASSPKPVY

SEQ ID NO: 831 - protein, 20 aa, Artificial Sequence
  Non-cyclic GFR-binding peptide
KYLVSIPSLQTPASSPKPVT

SEQ ID NO: 832 - protein, 20 aa, Artificial Sequence
  Non-cyclic GFR-binding peptide
KYLVSIPSLKTPASSAKPVA

SEQ ID NO: 833 - protein, 20 aa, Artificial Sequence
  Non-cyclic GFR-binding peptide
KYLVSIPSMKTPTSSPGASG

SEQ ID NO: 834 - protein, 20 aa, Artificial Sequence
  Non-cyclic GFR-binding peptide
KYLVSIPSLRAPVSSSAPAA

SEQ ID NO: 835 - protein, 20 aa, Artificial Sequence
  Non-cyclic GFR-binding peptide
KYLVSIPSLKTPASSPKPVH

SEQ ID NO: 836 - protein, 20 aa, Artificial Sequence
  Non-cyclic GFR-binding peptide
KYLVSIPSTKVPASSTSPVR

SEQ ID NO: 837 - protein, 20 aa, Artificial Sequence
  Non-cyclic GFR-binding peptide
KYLVSIPSLAQPVSSPAASA

SEQ ID NO: 838 - protein, 20 aa, Artificial Sequence
  Non-cyclic GFR-binding peptide
KYLVSIPSLDQSVSSPSASA

SEQ ID NO: 839 - protein, 20 aa, Artificial Sequence
  Non-cyclic GFR-binding peptide
KYLVSIPSLDQPVSSPSASA

SEQ ID NO: 840 - protein, 20 aa, Artificial Sequence
  Non-cyclic GFR-binding peptide
KYLVSIPSHHVRSPQSKVSS

SEQ ID NO: 841 - protein, 20 aa, Artificial Sequence
  Non-cyclic GFR-binding peptide
KYLVSIPSLQVQTPRSQVNR

SEQ ID NO: 842 - protein, 20 aa, Artificial Sequence
  Non-cyclic GFR-binding peptide
LYLISIPELETPVSSAKPIK

SEQ ID NO: 843 - protein, 20 aa, Artificial Sequence
  Non-cyclic GFR-binding peptide
LYLISIPEMKTPVSSPEPIG

SEQ ID NO: 844 - protein, 20 aa, Artificial Sequence
  Non-cyclic GFR-binding peptide
LYLISIPELETPVSSAKPIS

SEQ ID NO: 845 - protein, 20 aa, Artificial Sequence
  Non-cyclic GFR-binding peptide
LYLISIPELKTPVSTPKTVH

SEQ ID NO: 846 - protein, 20 aa, Artificial Sequence
  Non-cyclic GFR-binding peptide
LYLISIPELKTPVSSPKPVY

SEQ ID NO: 847 - protein, 20 aa, Artificial Sequence
  Non-cyclic GFR-binding peptide
LYLISIPELQTPVSSPKPVT

SEQ ID NO: 848 - protein, 20 aa, Artificial Sequence
  Non-cyclic GFR-binding peptide
LYLISIPELKTPVSSAKPVA

SEQ ID NO: 849 - protein, 20 aa, Artificial Sequence
  Non-cyclic GFR-binding peptide
LYLISIPEMKTPVSSPGASG

SEQ ID NO: 850 - protein, 20 aa, Artificial Sequence
  Non-cyclic GFR-binding peptide
LYLISIPELRTPVSSSAPAA

SEQ ID NO: 851 - protein, 20 aa, Artificial Sequence
  Non-cyclic GFR-binding peptide
LYLISIPELRTPVSSTPPTS

SEQ ID NO: 852 - protein, 20 aa, Artificial Sequence
  Non-cyclic GFR-binding peptide
LYLISIPELKTPVSSPKPVH

SEQ ID NO: 853 - protein, 20 aa, Artificial Sequence
  Non-cyclic GFR-binding peptide
LYLISIPETKTPVSSTSPVR

SEQ ID NO: 854 - protein, 20 aa, Artificial Sequence
  Non-cyclic GFR-binding peptide
LYLISIPELATPVSSPAASA

SEQ ID NO: 855 - protein, 20 aa, Artificial Sequence
  Non-cyclic GFR-binding peptide
LYLISIPELDTPVSSPSASA

SEQ ID NO: 856 - protein, 20 aa, Artificial Sequence
  Non-cyclic GFR-binding peptide
LYLISIPEMKEPVSSPEPIG

SEQ ID NO: 857 - protein, 20 aa, Artificial Sequence
  Non-cyclic GFR-binding peptide
LYLISIPELKTPASTPKTVH

SEQ ID NO: 858 - protein, 20 aa, Artificial Sequence
  Non-cyclic GFR-binding peptide
LYLISIPELKTPASSPKPVY

SEQ ID NO: 859 - protein, 20 aa, Artificial Sequence
  Non-cyclic GFR-binding peptide
LYLISIPELQTPASSPKPVT

SEQ ID NO: 860 - protein, 20 aa, Artificial Sequence
  Non-cyclic GFR-binding peptide
LYLISIPEMKTPTSSPGASG

SEQ ID NO: 861 - protein, 20 aa, Artificial Sequence
  Non-cyclic GFR-binding peptide
LYLISIPELRAPVSSSAPAA

SEQ ID NO: 862 - protein, 20 aa, Artificial Sequence
  Non-cyclic GFR-binding peptide
LYLISIPELAQPVSSPAASA

SEQ ID NO: 863 - protein, 20 aa, Artificial Sequence
  Non-cyclic GFR-binding peptide
LYLISIPELDQSVSSPSASA

SEQ ID NO: 864 - protein, 20 aa, Artificial Sequence
  Non-cyclic GFR-binding peptide
LYLISIPELDQPVSSPSASA

SEQ ID NO: 865 - protein, 20 aa, Artificial Sequence
  Non-cyclic GFR-binding peptide
LYLISIPEHHVRSPQSKVSS

SEQ ID NO: 866 - protein, 20 aa, Artificial Sequence
  Non-cyclic GFR-binding peptide
LYLISIPELQVQTPRSQVNR

SEQ ID NO: 867 - protein, 20 aa, Artificial Sequence
  Non-cyclic GFR-binding peptide
FYLMNIPSLKTPTSTPKTVH

SEQ ID NO: 868 - protein, 20 aa, Artificial Sequence
  Non-cyclic GFR-binding peptide
FYLMNIPSLQTPTSSPKPVT

SEQ ID NO: 869 - protein, 20 aa, Artificial Sequence
  Non-cyclic GFR-binding peptide
FYLMNIPSLKTPTSSAKPVA

SEQ ID NO: 870 - protein, 20 aa, Artificial Sequence
  Non-cyclic GFR-binding peptide
FYLMNIPSLKTPTSSAKGVK

SEQ ID NO: 871 - protein, 20 aa, Artificial Sequence
  Non-cyclic GFR-binding peptide
FYLMNIPSLKTPTSSAKSAK

SEQ ID NO: 872 - protein, 20 aa, Artificial Sequence
  Non-cyclic GFR-binding peptide
FYLMNIPSLRTPTSSSAPAA

SEQ ID NO: 873 - protein, 20 aa, Artificial Sequence
  Non-cyclic GFR-binding peptide
FYLMNIPSLRTPTSSTPPTS

SEQ ID NO: 874 - protein, 20 aa, Artificial Sequence
  Non-cyclic GFR-binding peptide
FYLMNIPSLKTPTSSPKPVH

SEQ ID NO: 875 - protein, 20 aa, Artificial Sequence
  Non-cyclic GFR-binding peptide
FYLMNIPSTKTPTSSTSPVR

SEQ ID NO: 876 - protein, 20 aa, Artificial Sequence
  Non-cyclic GFR-binding peptide
FYLMNIPSLATPTSSPAASA

SEQ ID NO: 877 - protein, 20 aa, Artificial Sequence
  Non-cyclic GFR-binding peptide
FYLMNIPSLDTPTSSPSASA

SEQ ID NO: 878 - protein, 20 aa, Artificial Sequence
  Non-cyclic GFR-binding peptide
FYLMNIPSLETPVSSAKPIK

SEQ ID NO: 879 - protein, 20 aa, Artificial Sequence
  Non-cyclic GFR-binding peptide
FYLMNIPSMKEPVSSPEPIG

SEQ ID NO: 880 - protein, 20 aa, Artificial Sequence
  Non-cyclic GFR-binding peptide
FYLMNIPSLETPVSSAKPIS

SEQ ID NO: 881 - protein, 20 aa, Artificial Sequence
  Non-cyclic GFR-binding peptide
FYLMNIPSLKTPASTPKTVH

SEQ ID NO: 882 - protein, 20 aa, Artificial Sequence
  Non-cyclic GFR-binding peptide
FYLMNIPSLKTPASSPKPVY

SEQ ID NO: 883 - protein, 20 aa, Artificial Sequence
  Non-cyclic GFR-binding peptide
FYLMNIPSLQTPASSPKPVT

SEQ ID NO: 884 - protein, 20 aa, Artificial Sequence
  Non-cyclic GFR-binding peptide
FYLMNIPSLKTPASSAKPVA

SEQ ID NO: 885 - protein, 20 aa, Artificial Sequence
  Non-cyclic GFR-binding peptide
FYLMNIPSLKTPVSSAKGVK

SEQ ID NO: 886 - protein, 20 aa, Artificial Sequence
  Non-cyclic GFR-binding peptide
FYLMNIPSLKTPVSSAKSAK

SEQ ID NO: 887 - protein, 20 aa, Artificial Sequence
  Non-cyclic GFR-binding peptide
FYLMNIPSLRAPVSSSAPAA

SEQ ID NO: 888 - protein, 20 aa, Artificial Sequence
  Non-cyclic GFR-binding peptide
FYLMNIPSLRTPVSSTPPTS

SEQ ID NO: 889 - protein, 20 aa, Artificial Sequence
  Non-cyclic GFR-binding peptide
FYLMNIPSLKTPASSPKPVH

SEQ ID NO: 890 - protein, 20 aa, Artificial Sequence
  Non-cyclic GFR-binding peptide
FYLMNIPSTKVPASSTSPVR

SEQ ID NO: 891 - protein, 20 aa, Artificial Sequence
  Non-cyclic GFR-binding peptide
FYLMNIPSLAQPVSSPAASA

SEQ ID NO: 892 - protein, 20 aa, Artificial Sequence
  Non-cyclic GFR-binding peptide
FYLMNIPSLDQSVSSPSASA

SEQ ID NO: 893 - protein, 20 aa, Artificial Sequence
  Non-cyclic GFR-binding peptide
FYLMNIPSLDQPVSSPSASA

SEQ ID NO: 894 - protein, 20 aa, Artificial Sequence
  Non-cyclic GFR-binding peptide
FYLMNIPSEETPVSELGEDN

SEQ ID NO: 895 - protein, 20 aa, Artificial Sequence
  Non-cyclic GFR-binding peptide
FYLMNIPSQGTPVSELGEDN

SEQ ID NO: 896 - protein, 20 aa, Artificial Sequence
  Non-cyclic GFR-binding peptide
FYLMNIPSHHVRSPQSKVSS

SEQ ID NO: 897 - protein, 20 aa, Artificial Sequence
  Non-cyclic GFR-binding peptide
FYLMNIPSLQVQTPRSQVNR

SEQ ID NO: 898 - protein, 20 aa, Artificial Sequence
  Non-cyclic GFR-binding peptide
IYLISIPSLEAPVSSAKPIK

SEQ ID NO: 899 - protein, 20 aa, Artificial Sequence
  Non-cyclic GFR-binding peptide
IYLISIPSLEAPVSSAKPIS

SEQ ID NO: 900 - protein, 20 aa, Artificial Sequence
  Non-cyclic GFR-binding peptide
IYLISIPSLKAPVSTPKTVH

SEQ ID NO: 901 - protein, 20 aa, Artificial Sequence
  Non-cyclic GFR-binding peptide
IYLISIPSLKAPVSSPKPVY

SEQ ID NO: 902 - protein, 20 aa, Artificial Sequence
  Non-cyclic GFR-binding peptide
IYLISIPSLQAPVSSPKPVT

SEQ ID NO: 903 - protein, 20 aa, Artificial Sequence
  Non-cyclic GFR-binding peptide
IYLISIPSLKAPVSSAKPVA

SEQ ID NO: 904 - protein, 20 aa, Artificial Sequence
  Non-cyclic GFR-binding peptide
IYLISIPSLKAPVSSAKGVK

SEQ ID NO: 905 - protein, 20 aa, Artificial Sequence
  Non-cyclic GFR-binding peptide
IYLISIPSLKAPVSSAKSAK

SEQ ID NO: 906 - protein, 20 aa, Artificial Sequence
  Non-cyclic GFR-binding peptide
IYLISIPSMKAPVSSPGASG

SEQ ID NO: 907 - protein, 20 aa, Artificial Sequence
  Non-cyclic GFR-binding peptide
IYLISIPSLRAPVSSTPPTS

SEQ ID NO: 908 - protein, 20 aa, Artificial Sequence
  Non-cyclic GFR-binding peptide
IYLISIPSLKAPVSSPKPVH

SEQ ID NO: 909 - protein, 20 aa, Artificial Sequence
  Non-cyclic GFR-binding peptide
IYLISIPSLDAPVSSPSASA

SEQ ID NO: 910 - protein, 20 aa, Artificial Sequence
  Non-cyclic GFR-binding peptide
IYLISIPSLETPVSSAKPIK

SEQ ID NO: 911 - protein, 20 aa, Artificial Sequence
  Non-cyclic GFR-binding peptide
IYLISIPSLETPVSSAKPIS

SEQ ID NO: 912 - protein, 20 aa, Artificial Sequence
  Non-cyclic GFR-binding peptide
IYLISIPSLKTPASTPKTVH

SEQ ID NO: 913 - protein, 20 aa, Artificial Sequence
  Non-cyclic GFR-binding peptide
IYLISIPSLKTPASSPKPVY

SEQ ID NO: 914 - protein, 20 aa, Artificial Sequence
  Non-cyclic GFR-binding peptide
IYLISIPSLKTPASSAKPVA

SEQ ID NO: 915 - protein, 20 aa, Artificial Sequence
  Non-cyclic GFR-binding peptide
IYLISIPSLKTPVSSAKGVK

SEQ ID NO: 916 - protein, 20 aa, Artificial Sequence
  Non-cyclic GFR-binding peptide
IYLISIPSLKTPVSSAKSAK

SEQ ID NO: 917 - protein, 20 aa, Artificial Sequence
  Non-cyclic GFR-binding peptide
IYLISIPSMKTPTSSPGASG

SEQ ID NO: 918 - protein, 20 aa, Artificial Sequence
  Non-cyclic GFR-binding peptide
IYLISIPSLRTPVSSTPPTS

SEQ ID NO: 919 - protein, 20 aa, Artificial Sequence
  Non-cyclic GFR-binding peptide
IYLISIPSLKTPASSPKPVH

SEQ ID NO: 920 - protein, 20 aa, Artificial Sequence
  Non-cyclic GFR-binding peptide
IYLISIPSTKVPASSTSPVR

SEQ ID NO: 921 - protein, 20 aa, Artificial Sequence
  Non-cyclic GFR-binding peptide
IYLISIPSLAQPVSSPAASA

SEQ ID NO: 922 - protein, 20 aa, Artificial Sequence
  Non-cyclic GFR-binding peptide
IYLISIPSLDQSVSSPSASA

SEQ ID NO: 923 - protein, 20 aa, Artificial Sequence
  Non-cyclic GFR-binding peptide
IYLISIPSLDQPVSSPSASA

SEQ ID NO: 924 - protein, 20 aa, Artificial Sequence
  Non-cyclic GFR-binding peptide
IYLISIPSQGTPVSELGEDN

SEQ ID NO: 925 - protein, 20 aa, Artificial Sequence
  Non-cyclic GFR-binding peptide
IYLISIPSHHVRSPQSKVSS

SEQ ID NO: 926 - protein, 20 aa, Artificial Sequence
  Non-cyclic GFR-binding peptide
IYLISIPSLQVQTPRSQVNR

SEQ ID NO: 927 - protein, 20 aa, Artificial Sequence
  Non-cyclic GFR-binding peptide
IFLISIPSLETPVSSAKPIK

SEQ ID NO: 928 - protein, 20 aa, Artificial Sequence
  Non-cyclic GFR-binding peptide
IFLISIPSMKTPVSSPEPIG

SEQ ID NO: 929 - protein, 20 aa, Artificial Sequence
  Non-cyclic GFR-binding peptide
IFLISIPSLETPVSSAKPIS

SEQ ID NO: 930 - protein, 20 aa, Artificial Sequence
  Non-cyclic GFR-binding peptide
IFLISIPSLKTPVSTPKTVH

SEQ ID NO: 931 - protein, 20 aa, Artificial Sequence
  Non-cyclic GFR-binding peptide
IFLISIPSLKTPVSSPKPVY

SEQ ID NO: 932 - protein, 20 aa, Artificial Sequence
  Non-cyclic GFR-binding peptide
IFLISIPSLQTPVSSPKPVT

SEQ ID NO: 933 - protein, 20 aa, Artificial Sequence
  Non-cyclic GFR-binding peptide
IFLISIPSLKTPVSSAKPVA

SEQ ID NO: 934 - protein, 20 aa, Artificial Sequence
  Non-cyclic GFR-binding peptide
IFLISIPSLKTPVSSAKGVK

SEQ ID NO: 935 - protein, 20 aa, Artificial Sequence
  Non-cyclic GFR-binding peptide
IFLISIPSLKTPVSSAKSAK

SEQ ID NO: 936 - protein, 20 aa, Artificial Sequence
  Non-cyclic GFR-binding peptide
IFLISIPSMKTPVSSPGASG

SEQ ID NO: 937 - protein, 20 aa, Artificial Sequence
  Non-cyclic GFR-binding peptide
IFLISIPSLRTPVSSSAPAA

SEQ ID NO: 938 - protein, 20 aa, Artificial Sequence
  Non-cyclic GFR-binding peptide
IFLISIPSLKTPVSSPKPVH

SEQ ID NO: 939 - protein, 20 aa, Artificial Sequence
  Non-cyclic GFR-binding peptide
IFLISIPSTKTPVSSTSPVR

SEQ ID NO: 940 - protein, 20 aa, Artificial Sequence
  Non-cyclic GFR-binding peptide
IFLISIPSLATPVSSPAASA

SEQ ID NO: 941 - protein, 20 aa, Artificial Sequence
  Non-cyclic GFR-binding peptide
IFLISIPSLDTPVSSPSASA

SEQ ID NO: 942 - protein, 20 aa, Artificial Sequence
  Non-cyclic GFR-binding peptide
IFLISIPSMKEPVSSPEPIG

SEQ ID NO: 943 - protein, 20 aa, Artificial Sequence
  Non-cyclic GFR-binding peptide
IFLISIPSLKTPASTPKTVH

SEQ ID NO: 944 - protein, 20 aa, Artificial Sequence
  Non-cyclic GFR-binding peptide
IFLISIPSLKTPASSPKPVY

SEQ ID NO: 945 - protein, 20 aa, Artificial Sequence
  Non-cyclic GFR-binding peptide
IFLISIPSLQTPASSPKPVT

SEQ ID NO: 946 - protein, 20 aa, Artificial Sequence
  Non-cyclic GFR-binding peptide
IFLISIPSLKTPASSAKPVA

SEQ ID NO: 947 - protein, 20 aa, Artificial Sequence
  Non-cyclic GFR-binding peptide
IFLISIPSMKTPTSSPGASG

SEQ ID NO: 948 - protein, 20 aa, Artificial Sequence
  Non-cyclic GFR-binding peptide
IFLISIPSLRAPVSSSAPAA

SEQ ID NO: 949 - protein, 20 aa, Artificial Sequence
  Non-cyclic GFR-binding peptide
IFLISIPSLKTPASSPKPVH

SEQ ID NO: 950 - protein, 20 aa, Artificial Sequence
  Non-cyclic GFR-binding peptide
IFLISIPSTKVPASSTSPVR

SEQ ID NO: 951 - protein, 20 aa, Artificial Sequence
  Non-cyclic GFR-binding peptide
IFLISIPSLAQPVSSPAASA

SEQ ID NO: 952 - protein, 20 aa, Artificial Sequence
  Non-cyclic GFR-binding peptide
IFLISIPSLDQSVSSPSASA

SEQ ID NO: 953 - protein, 20 aa, Artificial Sequence
  Non-cyclic GFR-binding peptide
IFLISIPSLDQPVSSPSASA

SEQ ID NO: 954 - protein, 20 aa, Artificial Sequence
  Non-cyclic GFR-binding peptide
VYLMSLPKLEVPASSAKPIK

SEQ ID NO: 955 - protein, 20 aa, Artificial Sequence
  Non-cyclic GFR-binding peptide
VYLMSLPKMKVPASSPEPIG

SEQ ID NO: 956 - protein, 20 aa, Artificial Sequence
  Non-cyclic GFR-binding peptide
VYLMSLPKLEVPASSAKPIS

SEQ ID NO: 957 - protein, 20 aa, Artificial Sequence
  Non-cyclic GFR-binding peptide
VYLMSLPKLKVPASTPKTVH

SEQ ID NO: 958 - protein, 20 aa, Artificial Sequence
  Non-cyclic GFR-binding peptide
VYLMSLPKLKVPASSPKPVY

SEQ ID NO: 959 - protein, 20 aa, Artificial Sequence
  Non-cyclic GFR-binding peptide
VYLMSLPKLQVPASSPKPVT

SEQ ID NO: 960 - protein, 20 aa, Artificial Sequence
  Non-cyclic GFR-binding peptide
VYLMSLPKLKVPASSAKPVA

SEQ ID NO: 961 - protein, 20 aa, Artificial Sequence
  Non-cyclic GFR-binding peptide
VYLMSLPKLKVPASSAKGVK

SEQ ID NO: 962 - protein, 20 aa, Artificial Sequence
  Non-cyclic GFR-binding peptide
VYLMSLPKLKVPASSAKSAK

SEQ ID NO: 963 - protein, 20 aa, Artificial Sequence
  Non-cyclic GFR-binding peptide
VYLMSLPKMKVPASSPGASG

SEQ ID NO: 964 - protein, 20 aa, Artificial Sequence
  Non-cyclic GFR-binding peptide
VYLMSLPKLRVPASSSAPAA

SEQ ID NO: 965 - protein, 20 aa, Artificial Sequence
  Non-cyclic GFR-binding peptide
VYLMSLPKLRVPASSTPPTS

SEQ ID NO: 966 - protein, 20 aa, Artificial Sequence
  Non-cyclic GFR-binding peptide
VYLMSLPKLKVPASSPKPVH

SEQ ID NO: 967 - protein, 20 aa, Artificial Sequence
  Non-cyclic GFR-binding peptide
VYLMSLPKLAVPASSPAASA

SEQ ID NO: 968 - protein, 20 aa, Artificial Sequence
  Non-cyclic GFR-binding peptide
VYLMSLPKLDVPASSPSASA

SEQ ID NO: 969 - protein, 20 aa, Artificial Sequence
  Non-cyclic GFR-binding peptide
VYLMSLPKLETPVSSAKPIK

SEQ ID NO: 970 - protein, 20 aa, Artificial Sequence
  Non-cyclic GFR-binding peptide
VYLMSLPKMKEPVSSPEPIG

SEQ ID NO: 971 - protein, 20 aa, Artificial Sequence
  Non-cyclic GFR-binding peptide
VYLMSLPKLETPVSSAKPIS

SEQ ID NO: 972 - protein, 20 aa, Artificial Sequence
  Non-cyclic GFR-binding peptide
VYLMSLPKLKTPASTPKTVH

SEQ ID NO: 973 - protein, 20 aa, Artificial Sequence
  Non-cyclic GFR-binding peptide
VYLMSLPKLKTPASSPKPVY

SEQ ID NO: 974 - protein, 20 aa, Artificial Sequence
  Non-cyclic GFR-binding peptide
VYLMSLPKLQTPASSPKPVT

SEQ ID NO: 975 - protein, 20 aa, Artificial Sequence
  Non-cyclic GFR-binding peptide
VYLMSLPKLKTPASSAKPVA

SEQ ID NO: 976 - protein, 20 aa, Artificial Sequence
  Non-cyclic GFR-binding peptide
VYLMSLPKLKTPVSSAKGVK

SEQ ID NO: 977 - protein, 20 aa, Artificial Sequence
  Non-cyclic GFR-binding peptide
VYLMSLPKLKTPVSSAKSAK

SEQ ID NO: 978 - protein, 20 aa, Artificial Sequence
  Non-cyclic GFR-binding peptide
VYLMSLPKMKTPTSSPGASG

SEQ ID NO: 979 - protein, 20 aa, Artificial Sequence
  Non-cyclic GFR-binding peptide
VYLMSLPKLRAPVSSSAPAA

SEQ ID NO: 980 - protein, 20 aa, Artificial Sequence
  Non-cyclic GFR-binding peptide
VYLMSLPKLRTPVSSTPPTS

SEQ ID NO: 981 - protein, 20 aa, Artificial Sequence
  Non-cyclic GFR-binding peptide
VYLMSLPKLKTPASSPKPVH

SEQ ID NO: 982 - protein, 20 aa, Artificial Sequence
  Non-cyclic GFR-binding peptide
VYLMSLPKLAQPVSSPAASA

SEQ ID NO: 983 - protein, 20 aa, Artificial Sequence
  Non-cyclic GFR-binding peptide
VYLMSLPKLDQSVSSPSASA

SEQ ID NO: 984 - protein, 20 aa, Artificial Sequence
  Non-cyclic GFR-binding peptide
VYLMSLPKLDQPVSSPSASA

SEQ ID NO: 985 - protein, 20 aa, Artificial Sequence
  Non-cyclic GFR-binding peptide
VYLMSLPKEETPVSELGEDN

SEQ ID NO: 986 - protein, 20 aa, Artificial Sequence
  Non-cyclic GFR-binding peptide
VYLMSLPKQGTPVSELGEDN

SEQ ID NO: 987 - protein, 20 aa, Artificial Sequence
  Non-cyclic GFR-binding peptide
YYVIPLPELKQPVSTPKTVH

SEQ ID NO: 988 - protein, 20 aa, Artificial Sequence
  Non-cyclic GFR-binding peptide
YYVIPLPELKQPVSSPKPVY

SEQ ID NO: 989 - protein, 20 aa, Artificial Sequence
  Non-cyclic GFR-binding peptide
YYVIPLPELQQPVSSPKPVT

SEQ ID NO: 990 - protein, 20 aa, Artificial Sequence
  Non-cyclic GFR-binding peptide
YYVIPLPELKQPVSSAKPVA

SEQ ID NO: 991 - protein, 20 aa, Artificial Sequence
  Non-cyclic GFR-binding peptide
YYVIPLPEMKQPVSSPGASG

SEQ ID NO: 992 - protein, 20 aa, Artificial Sequence
  Non-cyclic GFR-binding peptide
YYVIPLPELRQPVSSSAPAA

SEQ ID NO: 993 - protein, 20 aa, Artificial Sequence
  Non-cyclic GFR-binding peptide
YYVIPLPELRQPVSSTPPTS

SEQ ID NO: 994 - protein, 20 aa, Artificial Sequence
  Non-cyclic GFR-binding peptide
YYVIPLPELKQPVSSPKPVH

SEQ ID NO: 995 - protein, 20 aa, Artificial Sequence
  Non-cyclic GFR-binding peptide
YYVIPLPETKQPVSSTSPVR

SEQ ID NO: 996 - protein, 20 aa, Artificial Sequence
  Non-cyclic GFR-binding peptide
YYVIPLPELDQPVSSPSASA

SEQ ID NO: 997 - protein, 20 aa, Artificial Sequence
  Non-cyclic GFR-binding peptide
YYVIPLPEMKEPVSSPEPIG

SEQ ID NO: 998 - protein, 20 aa, Artificial Sequence
  Non-cyclic GFR-binding peptide
YYVIPLPELETPVSSAKPIS

SEQ ID NO: 999 - protein, 20 aa, Artificial Sequence
  Non-cyclic GFR-binding peptide
YYVIPLPELKTPASTPKTVH

SEQ ID NO: 1000 - protein, 20 aa, Artificial Sequence
  Non-cyclic GFR-binding peptide
YYVIPLPELKTPASSPKPVY

SEQ ID NO: 1001 - protein, 20 aa, Artificial Sequence
  Non-cyclic GFR-binding peptide
YYVIPLPELQTPASSPKPVT

SEQ ID NO: 1002 - protein, 20 aa, Artificial Sequence
  Non-cyclic GFR-binding peptide
YYVIPLPELKTPVSSAKGVK

SEQ ID NO: 1003 - protein, 20 aa, Artificial Sequence
  Non-cyclic GFR-binding peptide
YYVIPLPELKTPVSSAKSAK

SEQ ID NO: 1004 - protein, 20 aa, Artificial Sequence
  Non-cyclic GFR-binding peptide
YYVIPLPEMKTPTSSPGASG

SEQ ID NO: 1005 - protein, 20 aa, Artificial Sequence
  Non-cyclic GFR-binding peptide
YYVIPLPELRAPVSSSAPAA

SEQ ID NO: 1006 - protein, 20 aa, Artificial Sequence
  Non-cyclic GFR-binding peptide
YYVIPLPELRTPVSSTPPTS

SEQ ID NO: 1007 - protein, 20 aa, Artificial Sequence
  Non-cyclic GFR-binding peptide
YYVIPLPELKTPASSPKPVH

SEQ ID NO: 1008 - protein, 20 aa, Artificial Sequence
  Non-cyclic GFR-binding peptide
YYVIPLPETKVPASSTSPVR

SEQ ID NO: 1009 - protein, 20 aa, Artificial Sequence
  Non-cyclic GFR-binding peptide
YYVIPLPELDQSVSSPSASA

SEQ ID NO: 1010 - protein, 20 aa, Artificial Sequence
  Non-cyclic GFR-binding peptide
YYVIPLPEEETPVSELGEDN

SEQ ID NO: 1011 - protein, 20 aa, Artificial Sequence
  Non-cyclic GFR-binding peptide
YYVIPLPEQGTPVSELGEDN

SEQ ID NO: 1012 - protein, 20 aa, Artificial Sequence
  Non-cyclic GFR-binding peptide
YYVIPLPEHHVRSPQSKVSS

SEQ ID NO: 1013 - protein, 20 aa, Artificial Sequence
  Non-cyclic GFR-binding peptide
YYVIPLPELQVQTPRSQVNR

SEQ ID NO: 1014 - protein, 20 aa, Artificial Sequence
  Non-cyclic GFR-binding peptide
YYLITLPEMKQSVSSPEPIG

SEQ ID NO: 1015 - protein, 20 aa, Artificial Sequence
  Non-cyclic GFR-binding peptide
YYLITLPELEQSVSSAKPIS

SEQ ID NO: 1016 - protein, 20 aa, Artificial Sequence
  Non-cyclic GFR-binding peptide
YYLITLPELKQSVSTPKTVH

SEQ ID NO: 1017 - protein, 20 aa, Artificial Sequence
  Non-cyclic GFR-binding peptide
YYLITLPELKQSVSSPKPVY

SEQ ID NO: 1018 - protein, 20 aa, Artificial Sequence
  Non-cyclic GFR-binding peptide
YYLITLPELQQSVSSPKPVT

SEQ ID NO: 1019 - protein, 20 aa, Artificial Sequence
  Non-cyclic GFR-binding peptide
YYLITLPELKQSVSSAKPVA

SEQ ID NO: 1020 - protein, 20 aa, Artificial Sequence
  Non-cyclic GFR-binding peptide
YYLITLPELKQSVSSAKSAK

SEQ ID NO: 1021 - protein, 20 aa, Artificial Sequence
  Non-cyclic GFR-binding peptide
YYLITLPEMKQSVSSPGASG

SEQ ID NO: 1022 - protein, 20 aa, Artificial Sequence
  Non-cyclic GFR-binding peptide
YYLITLPELRQSVSSSAPAA

SEQ ID NO: 1023 - protein, 20 aa, Artificial Sequence
  Non-cyclic GFR-binding peptide
YYLITLPELRQSVSSTPPTS

SEQ ID NO: 1024 - protein, 20 aa, Artificial Sequence
  Non-cyclic GFR-binding peptide
YYLITLPELKQSVSSPKPVH

SEQ ID NO: 1025 - protein, 20 aa, Artificial Sequence
  Non-cyclic GFR-binding peptide
YYLITLPETKQSVSSTSPVR

SEQ ID NO: 1026 - protein, 20 aa, Artificial Sequence
  Non-cyclic GFR-binding peptide
YYLITLPELAQSVSSPAASA

SEQ ID NO: 1027 - protein, 20 aa, Artificial Sequence
  Non-cyclic GFR-binding peptide
YYLITLPELETPVSSAKPIK

SEQ ID NO: 1028 - protein, 20 aa, Artificial Sequence
  Non-cyclic GFR-binding peptide
YYLITLPEMKEPVSSPEPIG

SEQ ID NO: 1029 - protein, 20 aa, Artificial Sequence
  Non-cyclic GFR-binding peptide
YYLITLPELETPVSSAKPIS

SEQ ID NO: 1030 - protein, 20 aa, Artificial Sequence
  Non-cyclic GFR-binding peptide
YYLITLPELKTPASTPKTVH

SEQ ID NO: 1031 - protein, 20 aa, Artificial Sequence
  Non-cyclic GFR-binding peptide
YYLITLPELKTPASSPKPVY

SEQ ID NO: 1032 - protein, 20 aa, Artificial Sequence
  Non-cyclic GFR-binding peptide
YYLITLPELQTPASSPKPVT

SEQ ID NO: 1033 - protein, 20 aa, Artificial Sequence
  Non-cyclic GFR-binding peptide
YYLITLPELKTPASSAKPVA

SEQ ID NO: 1034 - protein, 20 aa, Artificial Sequence
  Non-cyclic GFR-binding peptide
YYLITLPELKTPVSSAKSAK

SEQ ID NO: 1035 - protein, 20 aa, Artificial Sequence
  Non-cyclic GFR-binding peptide
YYLITLPEMKTPTSSPGASG

SEQ ID NO: 1036 - protein, 20 aa, Artificial Sequence
  Non-cyclic GFR-binding peptide
YYLITLPELRAPVSSSAPAA

SEQ ID NO: 1037 - protein, 20 aa, Artificial Sequence
  Non-cyclic GFR-binding peptide
YYLITLPELRTPVSSTPPTS

SEQ ID NO: 1038 - protein, 20 aa, Artificial Sequence
  Non-cyclic GFR-binding peptide
YYLITLPELKTPASSPKPVH

SEQ ID NO: 1039 - protein, 20 aa, Artificial Sequence
  Non-cyclic GFR-binding peptide
YYLITLPETKVPASSTSPVR

SEQ ID NO: 1040 - protein, 20 aa, Artificial Sequence
  Non-cyclic GFR-binding peptide
YYLITLPEQGTPVSELGEDN

SEQ ID NO: 1041 - protein, 20 aa, Artificial Sequence
  Non-cyclic GFR-binding peptide
YYLITLPEHHVRSPQSKVSS

SEQ ID NO: 1042 - protein, 20 aa, Artificial Sequence
  Non-cyclic GFR-binding peptide
YYLITLPELQVQTPRSQVNR

SEQ ID NO: 1043 - protein, 20 aa, Artificial Sequence
  Non-cyclic GFR-binding peptide
YYLITLPELEQPVSSAKPIK

SEQ ID NO: 1044 - protein, 20 aa, Artificial Sequence
  Non-cyclic GFR-binding peptide
YYLITLPEMKQPVSSPEPIG

SEQ ID NO: 1045 - protein, 20 aa, Artificial Sequence
  Non-cyclic GFR-binding peptide
YYLITLPELEQPVSSAKPIS

SEQ ID NO: 1046 - protein, 20 aa, Artificial Sequence
  Non-cyclic GFR-binding peptide
YYLITLPELKQPVSTPKTVH

SEQ ID NO: 1047 - protein, 20 aa, Artificial Sequence
  Non-cyclic GFR-binding peptide
YYLITLPELKQPVSSPKPVY

SEQ ID NO: 1048 - protein, 20 aa, Artificial Sequence
  Non-cyclic GFR-binding peptide
YYLITLPELQQPVSSPKPVT

SEQ ID NO: 1049 - protein, 20 aa, Artificial Sequence
  Non-cyclic GFR-binding peptide
YYLITLPELKQPVSSAKPVA

SEQ ID NO: 1050 - protein, 20 aa, Artificial Sequence
  Non-cyclic GFR-binding peptide
YYLITLPELKQPVSSAKGVK

SEQ ID NO: 1051 - protein, 20 aa, Artificial Sequence
  Non-cyclic GFR-binding peptide
YYLITLPELKQPVSSAKSAK

SEQ ID NO: 1052 - protein, 20 aa, Artificial Sequence
  Non-cyclic GFR-binding peptide
YYLITLPEMKQPVSSPGASG

SEQ ID NO: 1053 - protein, 20 aa, Artificial Sequence
  Non-cyclic GFR-binding peptide
YYLITLPELRQPVSSSAPAA

SEQ ID NO: 1054 - protein, 20 aa, Artificial Sequence
  Non-cyclic GFR-binding peptide
YYLITLPELRQPVSSTPPTS

SEQ ID NO: 1055 - protein, 20 aa, Artificial Sequence
  Non-cyclic GFR-binding peptide
YYLITLPELKQPVSSPKPVH

SEQ ID NO: 1056 - protein, 20 aa, Artificial Sequence
  Non-cyclic GFR-binding peptide
YYLITLPETKQPVSSTSPVR

SEQ ID NO: 1057 - protein, 20 aa, Artificial Sequence
  Non-cyclic GFR-binding peptide
MIQMTINSQGTPVSELGEDN

SEQ ID NO: 1058 - protein, 20 aa, Artificial Sequence
  Non-cyclic GFR-binding peptide
MIQMTINSMKEPVSSPEPIG

SEQ ID NO: 1059 - protein, 20 aa, Artificial Sequence
  Non-cyclic GFR-binding peptide
MIQMTINSLKTPASTPKTVH

SEQ ID NO: 1060 - protein, 20 aa, Artificial Sequence
  Non-cyclic GFR-binding peptide
MIQMTINSLKTPASSPKPVY

SEQ ID NO: 1061 - protein, 20 aa, Artificial Sequence
  Non-cyclic GFR-binding peptide
MIQMTINSLQTPASSPKPVT

SEQ ID NO: 1062 - protein, 20 aa, Artificial Sequence
  Non-cyclic GFR-binding peptide
MIQMTINSLKTPASSAKPVA

SEQ ID NO: 1063 - protein, 20 aa, Artificial Sequence
  Non-cyclic GFR-binding peptide
MIQMTINSLKTPASSPKPVH

SEQ ID NO: 1064 - protein, 20 aa, Artificial Sequence
  Non-cyclic GFR-binding peptide
MIQMTINSTKVPASSTSPVR

SEQ ID NO: 1065 - protein, 20 aa, Artificial Sequence
  Non-cyclic GFR-binding peptide
MIQMTINSLAQPVSSPAASA

SEQ ID NO: 1066 - protein, 20 aa, Artificial Sequence
  Non-cyclic GFR-binding peptide
MIQMTINSLDQSVSSPSASA

SEQ ID NO: 1067 - protein, 20 aa, Artificial Sequence
  Non-cyclic GFR-binding peptide
MIQMTINSLDQPVSSPSASA

SEQ ID NO: 1068 - protein, 20 aa, Artificial Sequence
  Non-cyclic GFR-binding peptide
MIQMTINSHHVRSPQSKVSS

SEQ ID NO: 1069 - protein, 20 aa, Artificial Sequence
  Non-cyclic GFR-binding peptide
MIQMTINSLQVQTPRSQVNR

SEQ ID NO: 1070 - protein, 20 aa, Artificial Sequence
  Non-cyclic GFR-binding peptide
VKAVKVSRLQVRSPRSQVNR

SEQ ID NO: 1071 - protein, 20 aa, Artificial Sequence
  Non-cyclic GFR-binding peptide
VKAVKVSRLETPVSSAKPIK

SEQ ID NO: 1072 - protein, 20 aa, Artificial Sequence
  Non-cyclic GFR-binding peptide
VKAVKVSRMKEPVSSPEPIG

SEQ ID NO: 1073 - protein, 20 aa, Artificial Sequence
  Non-cyclic GFR-binding peptide
VKAVKVSRLKTPASSPKPVY

SEQ ID NO: 1074 - protein, 20 aa, Artificial Sequence
  Non-cyclic GFR-binding peptide
VKAVKVSRLKTPASSAKPVA

SEQ ID NO: 1075 - protein, 20 aa, Artificial Sequence
  Non-cyclic GFR-binding peptide
VKAVKVSRLKTPVSSAKGVK

SEQ ID NO: 1076 - protein, 20 aa, Artificial Sequence
  Non-cyclic GFR-binding peptide
VKAVKVSRLKTPVSSAKSAK

SEQ ID NO: 1077 - protein, 20 aa, Artificial Sequence
  Non-cyclic GFR-binding peptide
VKAVKVSRMKTPTSSPGASG

SEQ ID NO: 1078 - protein, 20 aa, Artificial Sequence
  Non-cyclic GFR-binding peptide
VKAVKVSRLRAPVSSSAPAA

SEQ ID NO: 1079 - protein, 20 aa, Artificial Sequence
  Non-cyclic GFR-binding peptide
VKAVKVSRLRTPVSSTPPTS

SEQ ID NO: 1080 - protein, 20 aa, Artificial Sequence
  Non-cyclic GFR-binding peptide
VKAVKVSRLKTPASSPKPVH

SEQ ID NO: 1081 - protein, 20 aa, Artificial Sequence
  Non-cyclic GFR-binding peptide
VKAVKVSRTKVPASSTSPVR

SEQ ID NO: 1082 - protein, 20 aa, Artificial Sequence
  Non-cyclic GFR-binding peptide
VKAVKVSRLDQSVSSPSASA

SEQ ID NO: 1083 - protein, 20 aa, Artificial Sequence
  Non-cyclic GFR-binding peptide
VKAVKVSRQGTPVSELGEDN

SEQ ID NO: 1084 - protein, 20 aa, Artificial Sequence
  Non-cyclic GFR-binding peptide
VKAVKVSRLQVQTPRSQVNR

SEQ ID NO: 1085 - protein, 20 aa, Artificial Sequence
  Non-cyclic GFR-binding peptide
IKRVQVPRHHVQTPQSKVSS

SEQ ID NO: 1086 - protein, 20 aa, Artificial Sequence
  Non-cyclic GFR-binding peptide
IKRVQVPRLETPVSSAKPIK

SEQ ID NO: 1087 - protein, 20 aa, Artificial Sequence
  Non-cyclic GFR-binding peptide
IKRVQVPRMKEPVSSPEPIG

SEQ ID NO: 1088 - protein, 20 aa, Artificial Sequence
  Non-cyclic GFR-binding peptide
IKRVQVPRLETPVSSAKPIS

SEQ ID NO: 1089 - protein, 20 aa, Artificial Sequence
  Non-cyclic GFR-binding peptide
IKRVQVPRLKTPASTPKTVH

SEQ ID NO: 1090 - protein, 20 aa, Artificial Sequence
  Non-cyclic GFR-binding peptide
IKRVQVPRLKTPASSPKPVY

SEQ ID NO: 1091 - protein, 20 aa, Artificial Sequence
  Non-cyclic GFR-binding peptide
IKRVQVPRLQTPASSPKPVT

SEQ ID NO: 1092 - protein, 20 aa, Artificial Sequence
  Non-cyclic GFR-binding peptide
IKRVQVPRLKTPASSAKPVA

SEQ ID NO: 1093 - protein, 20 aa, Artificial Sequence
  Non-cyclic GFR-binding peptide
IKRVQVPRLKTPVSSAKGVK

SEQ ID NO: 1094 - protein, 20 aa, Artificial Sequence
  Non-cyclic GFR-binding peptide
IKRVQVPRLKTPVSSAKSAK

SEQ ID NO: 1095 - protein, 20 aa, Artificial Sequence
  Non-cyclic GFR-binding peptide
IKRVQVPRMKTPTSSPGASG

SEQ ID NO: 1096 - protein, 20 aa, Artificial Sequence
  Non-cyclic GFR-binding peptide
IKRVQVPRLRAPVSSSAPAA

SEQ ID NO: 1097 - protein, 20 aa, Artificial Sequence
  Non-cyclic GFR-binding peptide
IKRVQVPRLRTPVSSTPPTS

SEQ ID NO: 1098 - protein, 20 aa, Artificial Sequence
  Non-cyclic GFR-binding peptide
IKRVQVPRLKTPASSPKPVH

SEQ ID NO: 1099 - protein, 20 aa, Artificial Sequence
  Non-cyclic GFR-binding peptide
IKRVQVPRTKVPASSTSPVR

SEQ ID NO: 1100 - protein, 20 aa, Artificial Sequence
  Non-cyclic GFR-binding peptide
IKRVQVPRLDQSVSSPSASA

SEQ ID NO: 1101 - protein, 20 aa, Artificial Sequence
  Non-cyclic GFR-binding peptide
IKRVQVPRQGTPVSELGEDN

SEQ ID NO: 1102 - protein, 20 aa, Artificial Sequence
  Non-cyclic GFR-binding peptide
IKRVQVPRHHVRSPQSKVSS

SEQ ID NO: 1103 - protein, 8 aa, Artificial Sequence
  Non-cyclic GFR-binding peptide
LYLISIAS

SEQ ID NO: 1104 - protein, 8 aa, Artificial Sequence
  Non-cyclic GFR-binding peptide
LYLVSIAS

SEQ ID NO: 1105 - protein, 8 aa, Artificial Sequence
  Non-cyclic GFR-binding peptide
FFLMSLSS

SEQ ID NO: 1106 - protein, 8 aa, Artificial Sequence
  Non-cyclic GFR-binding peptide
FFLVSLSS

SEQ ID NO: 1107 - protein, 8 aa, Artificial Sequence
  Non-cyclic GFR-binding peptide
FYLMSIAN

SEQ ID NO: 1108 - protein, 8 aa, Artificial Sequence
  Non-cyclic GFR-binding peptide
FYLISIAN

SEQ ID NO: 1109 - protein, 8 aa, Artificial Sequence
  Non-cyclic GFR-binding peptide
YYLMSTAS

SEQ ID NO: 1110 - protein, 8 aa, Artificial Sequence
  Non-cyclic GFR-binding peptide
YYLISTAS

SEQ ID NO: 1111 - protein, 8 aa, Artificial Sequence
  Non-cyclic GFR-binding peptide
KYLMSIPS

SEQ ID NO: 1112 - protein, 8 aa, Artificial Sequence
  Non-cyclic GFR-binding peptide
KYLISIPS

SEQ ID NO: 1113 - protein, 8 aa, Artificial Sequence
  Non-cyclic GFR-binding peptide
LYLMSIPE

SEQ ID NO: 1114 - protein, 8 aa, Artificial Sequence
  Non-cyclic GFR-binding peptide
LYLVSIPE

SEQ ID NO: 1115 - protein, 8 aa, Artificial Sequence
  Non-cyclic GFR-binding peptide
FYLINIPS

SEQ ID NO: 1116 - protein, 8 aa, Artificial Sequence
  Non-cyclic GFR-binding peptide
FYLVNIPS

SEQ ID NO: 1117 - protein, 8 aa, Artificial Sequence
  Non-cyclic GFR-binding peptide
IYLMSIPS

SEQ ID NO: 1118 - protein, 8 aa, Artificial Sequence
  Non-cyclic GFR-binding peptide
IYLVSIPS

SEQ ID NO: 1119 - protein, 8 aa, Artificial Sequence
  Non-cyclic GFR-binding peptide
IFLMSIPS

SEQ ID NO: 1120 - protein, 8 aa, Artificial Sequence
  Non-cyclic GFR-binding peptide
IFLVSIPS

SEQ ID NO: 1121 - protein, 8 aa, Artificial Sequence
  Non-cyclic GFR-binding peptide
VYLISLPK

SEQ ID NO: 1122 - protein, 8 aa, Artificial Sequence
  Non-cyclic GFR-binding peptide
VYLVSLPK

SEQ ID NO: 1123 - protein, 8 aa, Artificial Sequence
  Non-cyclic GFR-binding peptide
YYVMPLPE

SEQ ID NO: 1124 - protein, 8 aa, Artificial Sequence
  Non-cyclic GFR-binding peptide
YYVVPLPE

SEQ ID NO: 1125 - protein, 8 aa, Artificial Sequence
  Non-cyclic GFR-binding peptide
YYLMTLPE

SEQ ID NO: 1126 - protein, 8 aa, Artificial Sequence
  Non-cyclic GFR-binding peptide
YYLVTLPE

SEQ ID NO: 1127 - protein, 8 aa, Artificial Sequence
  Non-cyclic GFR-binding peptide
MIQITINS

SEQ ID NO: 1128 - protein, 8 aa, Artificial Sequence
  Non-cyclic GFR-binding peptide
MIQVTINS

SEQ ID NO: 1129 - protein, 8 aa, Artificial Sequence
  Non-cyclic GFR-binding peptide
VKAMKVSR

SEQ ID NO: 1130 - protein, 8 aa, Artificial Sequence
  Non-cyclic GFR-binding peptide
VKAIKVSR

SEQ ID NO: 1131 - protein, 8 aa, Artificial Sequence
  Non-cyclic GFR-binding peptide
IKRMQVPR

SEQ ID NO: 1132 - protein, 8 aa, Artificial Sequence
  Non-cyclic GFR-binding peptide
IKRIQVPR

SEQ ID NO: 1133 - protein, 20 aa, Artificial Sequence
  Non-cyclic GFR-binding peptide
KIPKASSVPTELSAISMLYL

SEQ ID NO: 1134 - protein, 20 aa, Artificial Sequence
  Non-cyclic GFR-binding peptide
GIPEPSSVPEKMSSLSILFF

SEQ ID NO: 1135 - protein, 20 aa, Artificial Sequence
  Non-cyclic GFR-binding peptide
SIPKASSVPTELSAISMLYL

SEQ ID NO: 1136 - protein, 20 aa, Artificial Sequence
  Non-cyclic GFR-binding peptide
HVTKPTSAPTKLNAISVLYF

SEQ ID NO: 1137 - protein, 20 aa, Artificial Sequence
  Non-cyclic GFR-binding peptide
TVPKPSSAPTQLNAISVLYF

SEQ ID NO: 1138 - protein, 20 aa, Artificial Sequence
  Non-cyclic GFR-binding peptide
AVPKASSAPTKLSATSVLYY

SEQ ID NO: 1139 - protein, 20 aa, Artificial Sequence
  Non-cyclic GFR-binding peptide
KVGKASSVPTKLSPISVLYK

SEQ ID NO: 1140 - protein, 20 aa, Artificial Sequence
  Non-cyclic GFR-binding peptide
KASKASSVPTKLEPISILYL

SEQ ID NO: 1141 - protein, 20 aa, Artificial Sequence
  Non-cyclic GFR-binding peptide
GSAGPSSTPTKMSPINMLYF

SEQ ID NO: 1142 - protein, 20 aa, Artificial Sequence
  Non-cyclic GFR-binding peptide
STPPTSSVPTRLSPISILFI

SEQ ID NO: 1143 - protein, 20 aa, Artificial Sequence
  Non-cyclic GFR-binding peptide
HVPKPSSAPTKLNAISVLYF

SEQ ID NO: 1144 - protein, 20 aa, Artificial Sequence
  Non-cyclic GFR-binding peptide
RVPSTSSAPVKTKPLSMLYV

SEQ ID NO: 1145 - protein, 20 aa, Artificial Sequence
  Non-cyclic GFR-binding peptide
SSVKSQPSRVHHRSVKVAKV

SEQ ID NO: 1146 - protein, 20 aa, Artificial Sequence
  Non-cyclic GFR-binding peptide
RNVQSRPTQVQLRPVQVRKI

SEQ ID NO: 1147 - protein, 20 aa, Artificial Sequence
  Non-cyclic GFR-binding peptide
LYLMSIASLETPVSSAKPIK

SEQ ID NO: 1148 - protein, 20 aa, Artificial Sequence
  Non-cyclic GFR-binding peptide
FFLISLSSMKEPVSSPEPIG

SEQ ID NO: 1149 - protein, 20 aa, Artificial Sequence
  Non-cyclic GFR-binding peptide
LYLMSIASLETPVSSAKPIS

SEQ ID NO: 1150 - protein, 20 aa, Artificial Sequence
  Non-cyclic GFR-binding peptide
FYLVSIANLKTPASTPKTVH

SEQ ID NO: 1151 - protein, 20 aa, Artificial Sequence
  Non-cyclic GFR-binding peptide
FYLVSIANLQTPASSPKPVT

SEQ ID NO: 1152 - protein, 20 aa, Artificial Sequence
  Non-cyclic GFR-binding peptide
YYLVSTASLKTPASSAKPVA

SEQ ID NO: 1153 - protein, 20 aa, Artificial Sequence
  Non-cyclic GFR-binding peptide
KYLVSIPSLKTPVSSAKGVK

SEQ ID NO: 1154 - protein, 20 aa, Artificial Sequence
  Non-cyclic GFR-binding peptide
LYLISIPELKTPVSSAKSAK

SEQ ID NO: 1155 - protein, 20 aa, Artificial Sequence
  Non-cyclic GFR-binding peptide
FYLMNIPSMKTPTSSPGASG

SEQ ID NO: 1156 - protein, 20 aa, Artificial Sequence
  Non-cyclic GFR-binding peptide
IFLISIPSLRTPVSSTPPTS

SEQ ID NO: 1157 - protein, 20 aa, Artificial Sequence
  Non-cyclic GFR-binding peptide
FYLVSIANLKTPASSPKPVH

SEQ ID NO: 1158 - protein, 20 aa, Artificial Sequence
  Non-cyclic GFR-binding peptide
VYLMSLPKTKVPASSTSPVR

SEQ ID NO: 1159 - protein, 20 aa, Artificial Sequence
  Non-cyclic GFR-binding peptide
VKAVKVSRHHVRSPQSKVSS

SEQ ID NO: 1160 - protein, 20 aa, Artificial Sequence
  Non-cyclic GFR-binding peptide
IKRVQVPRLQVQTPRSQVNR

SEQ ID NO: 1161 - protein, 18 aa, Artificial Sequence
  Non-cyclic GFR-binding peptide
  MOD_RES (14)..(15): Xaa is C or S
KYLMSIPSLETPVXXAKP

SEQ ID NO: 1162 - protein, 13 aa, Artificial Sequence
  Non-cyclic GFR-binding peptide
LYLVSIASLQTPA

SEQ ID NO: 1163 - protein, 10 aa, Artificial Sequence
  Non-cyclic GFR-binding peptide
YYLISTASLA

SEQ ID NO: 1164 - protein, 10 aa, Artificial Sequence
  Non-cyclic GFR-binding peptide
KYLMSIPSLE

SEQ ID NO: 1165 - protein, 18 aa, Artificial Sequence
  Non-cyclic GFR-binding peptide
  MOD_RES (14)..(15): Xaa is C or S
KYLISIPSLDQSVXXPSA

SEQ ID NO: 1166 - protein, 19 aa, Artificial Sequence
  Non-cyclic GFR-binding peptide
  MOD_RES (14)..(15): Xaa is C or S
YYLISTASLDQSVXXPSAS

SEQ ID NO: 1167 - protein, 19 aa, Artificial Sequence
  Non-cyclic GFR-binding peptide
  MOD_RES (14)..(15): Xaa is C or S
LYLISIASLDQSVXXPSAS

SEQ ID NO: 1168 - protein, 11 aa, Artificial Sequence
  Non-cyclic GFR-binding peptide
FYLISIANLDQ

SEQ ID NO: 1169 - protein, 13 aa, Artificial Sequence
  Non-cyclic GFR-binding peptide
LYLISIASLAQPV

SEQ ID NO: 1170 - protein, 10 aa, Artificial Sequence
  Non-cyclic GFR-binding peptide
LYLISIASLA

SEQ ID NO: 1171 - protein, 16 aa, Artificial Sequence
  Non-cyclic GFR-binding peptide
  MOD_RES (14)..(15): Xaa is C or S
YYLVSTASLQTPAXXP

SEQ ID NO: 1172 - protein, 16 aa, Artificial Sequence
  Non-cyclic GFR-binding peptide
  MOD_RES (14)..(15): Xaa is C or S
YYLISTASLAQPVXXP

SEQ ID NO: 1173 - protein, 12 aa, Artificial Sequence
  Non-cyclic GFR-binding peptide
KYLISIPSLAQP

SEQ ID NO: 1174 - protein, 13 aa, Artificial Sequence
  Non-cyclic GFR-binding peptide
YYLISTASLDQSV

SEQ ID NO: 1175 - protein, 10 aa, Artificial Sequence
  Non-cyclic GFR-binding peptide
FYLMSIANLE

SEQ ID NO: 1176 - protein, 18 aa, Artificial Sequence
  Non-cyclic GFR-binding peptide
  MOD_RES (14)..(15): Xaa is C or S
YYLISTASLDQPVXXPSA

SEQ ID NO: 1177 - protein, 18 aa, Artificial Sequence
  Non-cyclic GFR-binding peptide
  MOD_RES (14)..(15): Xaa is C or S
YYLISTASLAQPVXXPAA

SEQ ID NO: 1178 - protein, 20 aa, Artificial Sequence
  Non-cyclic GFR-binding peptide
  MOD_RES (14)..(15): Xaa is C or S
YYLVSTASLQTPAXXPKPVT

SEQ ID NO: 1179 - protein, 12 aa, Artificial Sequence
  Non-cyclic GFR-binding peptide
LYLISIASLDQS

SEQ ID NO: 1180 - protein, 18 aa, Artificial Sequence
  Non-cyclic GFR-binding peptide
  MOD_RES (14)..(15): Xaa is C or S
FYLVSIANLKTPAXXAKP

SEQ ID NO: 1181 - protein, 17 aa, Artificial Sequence
  Non-cyclic GFR-binding peptide
  MOD_RES (16)..(16): Xaa is C or S
KYLVSIPSLQVQTPRXQ

SEQ ID NO: 1182 - protein, 20 aa, Artificial Sequence
  Non-cyclic GFR-binding peptide
  MOD_RES (16)..(16): Xaa is C or S
YYLVSTASLQVQTPRXQVNR

SEQ ID NO: 1183 - protein, 18 aa, Artificial Sequence
  Non-cyclic GFR-binding peptide
  MOD_RES (16)..(16): Xaa is C or S
LYLVSIASLQVQTPRXQV

SEQ ID NO: 1184 - protein, 16 aa, Artificial Sequence
  Non-cyclic GFR-binding peptide
  MOD_RES (14)..(15): Xaa is C or S
LYLISIASLAQPVXXP

SEQ ID NO: 1185 - protein, 12 aa, Artificial Sequence
  Non-cyclic GFR-binding peptide
KYLVSIPSLQTP

SEQ ID NO: 1186 - protein, 16 aa, Artificial Sequence
  Non-cyclic GFR-binding peptide
  MOD_RES (14)..(15): Xaa is C or S
LYLVSIASLQTPAXXP

SEQ ID NO: 1187 - protein, 17 aa, Artificial Sequence
  Non-cyclic GFR-binding peptide
  MOD_RES (16)..(16): Xaa is C or S
LYLVSIASLQVQTPRXQ

SEQ ID NO: 1188 - protein, 19 aa, Artificial Sequence
  Non-cyclic GFR-binding peptide
  MOD_RES (14)..(15): Xaa is C or S
YYLVSTASLQTPAXXPKPV

SEQ ID NO: 1189 - protein, 13 aa, Artificial Sequence
  Non-cyclic GFR-binding peptide
LYLISIASLDQSV

SEQ ID NO: 1190 - protein, 14 aa, Artificial Sequence
  Non-cyclic GFR-binding peptide
FYLVSIANLQVQTP

SEQ ID NO: 1191 - protein, 17 aa, Artificial Sequence
  Non-cyclic GFR-binding peptide
  MOD_RES (14)..(15): Xaa is C or S
FYLISIANLDQPVXXPS

SEQ ID NO: 1192 - protein, 16 aa, Artificial Sequence
  Non-cyclic GFR-binding peptide
  MOD_RES (14)..(15): Xaa is C or S
LYLVSIASLKTPAXXA

SEQ ID NO: 1193 - protein, 20 aa, Artificial Sequence
  Non-cyclic GFR-binding peptide
  MOD_RES (14)..(15): Xaa is C or S
FYLVSIANLKTPAXXAKPVA

SEQ ID NO: 1194 - protein, 18 aa, Artificial Sequence
  Non-cyclic GFR-binding peptide
  MOD_RES (14)..(15): Xaa is C or S
LYLISIASLDQPVXXPSA

SEQ ID NO: 1195 - protein, 15 aa, Artificial Sequence
  Non-cyclic GFR-binding peptide
  MOD_RES (14)..(15): Xaa is C or S
LYLISIASLAQPVXX

SEQ ID NO: 1196 - protein, 18 aa, Artificial Sequence
  Non-cyclic GFR-binding peptide
  MOD_RES (14)..(15): Xaa is C or S
LYLVSIASLKTPVXXAKG

SEQ ID NO: 1197 - protein, 11 aa, Artificial Sequence
  Non-cyclic GFR-binding peptide
KYLISIPSLDQ

SEQ ID NO: 1198 - protein, 18 aa, Artificial Sequence
  Non-cyclic GFR-binding peptide
  MOD_RES (16)..(16): Xaa is C or S
YYLVSTASLQVQTPRXQV

SEQ ID NO: 1199 - protein, 9 aa, Artificial Sequence
  Non-cyclic GFR-binding peptide
YYLMSTASL

SEQ ID NO: 1200 - protein, 18 aa, Artificial Sequence
  Non-cyclic GFR-binding peptide
  MOD_RES (14)..(15): Xaa is C or S
FYLMSIANLETPVXXAKP

SEQ ID NO: 1201 - protein, 13 aa, Artificial Sequence
  Non-cyclic GFR-binding peptide
YYLISTASLAQPV

SEQ ID NO: 1202 - protein, 15 aa, Artificial Sequence
  Non-cyclic GFR-binding peptide
  MOD_RES (14)..(14): Xaa is C or S
YYLVSTASLKTPAXT

SEQ ID NO: 1203 - protein, 11 aa, Artificial Sequence
  Non-cyclic GFR-binding peptide
KYLMSIPSLET

SEQ ID NO: 1204 - protein, 17 aa, Artificial Sequence
  Non-cyclic GFR-binding peptide
  MOD_RES (16)..(16): Xaa is C or S
YYLVSTASLQVQTPRXQ

SEQ ID NO: 1205 - protein, 17 aa, Artificial Sequence
  Non-cyclic GFR-binding peptide
  MOD_RES (14)..(15): Xaa is C or S
KYLISIPSLAQPVXXPA

SEQ ID NO: 1206 - protein, 18 aa, Artificial Sequence
  Non-cyclic GFR-binding peptide
  MOD_RES (14)..(15): Xaa is C or S
FYLVSIANLKTPVXXAKG

SEQ ID NO: 1207 - protein, 20 aa, Artificial Sequence
  Non-cyclic GFR-binding peptide
  MOD_RES (14)..(15): Xaa is C or S
YYLMSTASLETPVXXAKPIS

SEQ ID NO: 1208 - protein, 15 aa, Artificial Sequence
  Non-cyclic GFR-binding peptide
  MOD_RES (14)..(15): Xaa is C or S
YYLISTASLAQPVXX

SEQ ID NO: 1209 - protein, 17 aa, Artificial Sequence
  Non-cyclic GFR-binding peptide
  MOD_RES (14)..(15): Xaa is C or S
FYLMSIANLETPVXXAK

SEQ ID NO: 1210 - protein, 17 aa, Artificial Sequence
  Non-cyclic GFR-binding peptide
  MOD_RES (14)..(15): Xaa is C or S
FYLISIANLAQPVXXPA

SEQ ID NO: 1211 - protein, 18 aa, Artificial Sequence
  Non-cyclic GFR-binding peptide
  MOD_RES (14)..(15): Xaa is C or S
LYLISIASLAQPVXXPAA

SEQ ID NO: 1212 - protein, 20 aa, Artificial Sequence
  Non-cyclic GFR-binding peptide
  MOD_RES (14)..(15): Xaa is C or S
LYLVSIASLQTPAXXPKPVT

SEQ ID NO: 1213 - protein, 19 aa, Artificial Sequence
  Non-cyclic GFR-binding peptide
  MOD_RES (14)..(15): Xaa is C or S
LYLVSIASLQTPAXXPKPV

SEQ ID NO: 1214 - protein, 11 aa, Artificial Sequence
  Non-cyclic GFR-binding peptide
FYLMSIANLET

SEQ ID NO: 1215 - protein, 17 aa, Artificial Sequence
  Non-cyclic GFR-binding peptide
  MOD_RES (14)..(15): Xaa is C or S
KYLMSIPSLETPVXXAK

SEQ ID NO: 1216 - protein, 12 aa, Artificial Sequence
  Non-cyclic GFR-binding peptide
YYLISTASLDQS

SEQ ID NO: 1217 - protein, 14 aa, Artificial Sequence
  Non-cyclic GFR-binding peptide
  MOD_RES (14)..(14): Xaa is C or S
LYLISIASLAQPVX

SEQ ID NO: 1218 - protein, 20 aa, Artificial Sequence
  Non-cyclic GFR-binding peptide
  MOD_RES (14)..(14): Xaa is C or S
LYLVSIASLKTPAXTPKTVH

SEQ ID NO: 1219 - protein, 20 aa, Artificial Sequence
  Non-cyclic GFR-binding peptide
  MOD_RES (14)..(15): Xaa is C or S
KYLVSIPSLQTPAXXPKPVT

SEQ ID NO: 1220 - protein, 18 aa, Artificial Sequence
  Non-cyclic GFR-binding peptide
  MOD_RES (14)..(15): Xaa is C or S
KYLISIPSLDQPVXXPSA

SEQ ID NO: 1221 - protein, 13 aa, Artificial Sequence
  Non-cyclic GFR-binding peptide
LYLVSIASLKTPA

SEQ ID NO: 1222 - protein, 19 aa, Artificial Sequence
  Non-cyclic GFR-binding peptide
  MOD_RES (14)..(15): Xaa is C or S
YYLISTASLAQPVXXPAAS

SEQ ID NO: 1223 - protein, 17 aa, Artificial Sequence
  Non-cyclic GFR-binding peptide
  MOD_RES (14)..(15): Xaa is C or S
FYLVSIANLKTPAXXAK

SEQ ID NO: 1224 - protein, 17 aa, Artificial Sequence
  Non-cyclic GFR-binding peptide
  MOD_RES (14)..(15): Xaa is C or S
KYLISIPSLDQPVXXPS

SEQ ID NO: 1225 - protein, 19 aa, Artificial Sequence
  Non-cyclic GFR-binding peptide
  MOD_RES (14)..(15): Xaa is C or S
YYLISTASLDQPVXXPSAS

SEQ ID NO: 1226 - protein, 16 aa, Artificial Sequence
  Non-cyclic GFR-binding peptide
  MOD_RES (16)..(16): Xaa is C or S
LYLVSIASLQVQTPRX

SEQ ID NO: 1227 - protein, 19 aa, Artificial Sequence
  Non-cyclic GFR-binding peptide
  MOD_RES (14)..(15): Xaa is C or S
LYLVSIASLKTPAXXAKPV

SEQ ID NO: 1228 - protein, 20 aa, Artificial Sequence
  Non-cyclic GFR-binding peptide
  MOD_RES (14)..(15): Xaa is C or S
KYLVSIPSLKTPAXXAKPVA

SEQ ID NO: 1229 - protein, 16 aa, Artificial Sequence
  Non-cyclic GFR-binding peptide
  MOD_RES (14)..(15): Xaa is C or S
KYLISIPSLAQPVXXP

SEQ ID NO: 1230 - protein, 20 aa, Artificial Sequence
  Non-cyclic GFR-binding peptide
  MOD_RES (16)..(16): Xaa is C or S
FYLVSIANLQVQTPRXQVNR

SEQ ID NO: 1231 - protein, 16 aa, Artificial Sequence
  Non-cyclic GFR-binding peptide
  MOD_RES (14)..(15): Xaa is C or S
YYLVSTASLKTPAXXP

SEQ ID NO: 1232 - protein, 19 aa, Artificial Sequence
  Non-cyclic GFR-binding peptide
  MOD_RES (14)..(15): Xaa is C or S
LYLISIASLDQPVXXPSAS

SEQ ID NO: 1233 - protein, 17 aa, Artificial Sequence
  Non-cyclic GFR-binding peptide
  MOD_RES (14)..(15): Xaa is C or S
FYLVSIANLKTPVXXAK

SEQ ID NO: 1234 - protein, 15 aa, Artificial Sequence
  Non-cyclic GFR-binding peptide
FYLVSIANLQVQTPR

SEQ ID NO: 1235 - protein, 19 aa, Artificial Sequence
  Non-cyclic GFR-binding peptide
  MOD_RES (14)..(15): Xaa is C or S
KYLISIPSLDQSVXXPSAS

SEQ ID NO: 1236 - protein, 17 aa, Artificial Sequence
  Non-cyclic GFR-binding peptide
  MOD_RES (14)..(14): Xaa is C or S
LYLVSIASLKTPAXTPK

SEQ ID NO: 1237 - protein, 15 aa, Artificial Sequence
  Non-cyclic GFR-binding peptide
  MOD_RES (14)..(15): Xaa is C or S
FYLISIANLDQPVXX

SEQ ID NO: 1238 - protein, 14 aa, Artificial Sequence
  Non-cyclic GFR-binding peptide
  MOD_RES (14)..(14): Xaa is C or S
KYLMSIPSLETPVX

SEQ ID NO: 1239 - protein, 17 aa, Artificial Sequence
  Non-cyclic GFR-binding peptide
  MOD_RES (14)..(15): Xaa is C or S
YYLISTASLDQSVXXPS

SEQ ID NO: 1240 - protein, 11 aa, Artificial Sequence
  Non-cyclic GFR-binding peptide
LYLVSIASLKT

SEQ ID NO: 1241 - protein, 11 aa, Artificial Sequence
  Non-cyclic GFR-binding peptide
YYLISTASLAQ

SEQ ID NO: 1242 - protein, 11 aa, Artificial Sequence
  Non-cyclic GFR-binding peptide
YYLISTASLDQ

SEQ ID NO: 1243 - protein, 12 aa, Artificial Sequence
  Non-cyclic GFR-binding peptide
YYLMSTASLETP

SEQ ID NO: 1244 - protein, 20 aa, Artificial Sequence
  Non-cyclic GFR-binding peptide
  MOD_RES (14)..(15): Xaa is C or S
FYLMSIANLETPVXXAKPIK

SEQ ID NO: 1245 - protein, 18 aa, Artificial Sequence
  Non-cyclic GFR-binding peptide
  MOD_RES (16)..(16): Xaa is C or S
FYLVSIANLQVQTPRXQV

SEQ ID NO: 1246 - protein, 17 aa, Artificial Sequence
  Non-cyclic GFR-binding peptide
  MOD_RES (14)..(15): Xaa is C or S
LYLVSIASLKTPAXXPK

SEQ ID NO: 1247 - protein, 12 aa, Artificial Sequence
  Non-cyclic GFR-binding peptide
FYLISIANLDQS

SEQ ID NO: 1248 - protein, 18 aa, Artificial Sequence
  Non-cyclic GFR-binding peptide
  MOD_RES (14)..(15): Xaa is C or S
LYLVSIASLKTPAXXAKP

SEQ ID NO: 1249 - protein, 11 aa, Artificial Sequence
  Non-cyclic GFR-binding peptide
FYLVSIANLQV

SEQ ID NO: 1250 - protein, 10 aa, Artificial Sequence
  Non-cyclic GFR-binding peptide
FYLISIANLA

SEQ ID NO: 1251 - protein, 15 aa, Artificial Sequence
  Non-cyclic GFR-binding peptide
  MOD_RES (14)..(15): Xaa is C or S
FYLISIANLAQPVXX

SEQ ID NO: 1252 - protein, 13 aa, Artificial Sequence
  Non-cyclic GFR-binding peptide
LYLISIASLDQPV

SEQ ID NO: 1253 - protein, 13 aa, Artificial Sequence
  Non-cyclic GFR-binding peptide
FYLISIANLAQPV

SEQ ID NO: 1254 - protein, 12 aa, Artificial Sequence
  Non-cyclic GFR-binding peptide
KYLMSIPSLETP

SEQ ID NO: 1255 - protein, 14 aa, Artificial Sequence
  Non-cyclic GFR-binding peptide
  MOD_RES (14)..(14): Xaa is C or S
YYLMSTASLETPVX

SEQ ID NO: 1256 - protein, 14 aa, Artificial Sequence
  Non-cyclic GFR-binding peptide
  MOD_RES (14)..(14): Xaa is C or S
LYLISIASLDQPVX

SEQ ID NO: 1257 - protein, 9 aa, Artificial Sequence
  Non-cyclic GFR-binding peptide
KYLMSIPSL

SEQ ID NO: 1258 - protein, 15 aa, Artificial Sequence
  Non-cyclic GFR-binding peptide
  MOD_RES (14)..(14): Xaa is C or S
KYLVSIPSLKTPAXT

SEQ ID NO: 1259 - protein, 18 aa, Artificial Sequence
  Non-cyclic GFR-binding peptide
  MOD_RES (14)..(15): Xaa is C or S
LYLVSIASLKTPAXXPKP

SEQ ID NO: 1260 - protein, 16 aa, Artificial Sequence
  Non-cyclic GFR-binding peptide
  MOD_RES (14)..(15): Xaa is C or S
YYLISTASLDQPVXXP

SEQ ID NO: 1261 - protein, 14 aa, Artificial Sequence
  Non-cyclic GFR-binding peptide
  MOD_RES (14)..(14): Xaa is C or S
FYLISIANLDQSVX

SEQ ID NO: 1262 - protein, 18 aa, Artificial Sequence
  Non-cyclic GFR-binding peptide
  MOD_RES (14)..(15): Xaa is C or S
YYLVSTASLKTPVXXAKG

SEQ ID NO: 1263 - protein, 15 aa, Artificial Sequence
  Non-cyclic GFR-binding peptide
  MOD_RES (14)..(15): Xaa is C or S
KYLMSIPSLETPVXX

SEQ ID NO: 1264 - protein, 16 aa, Artificial Sequence
  Non-cyclic GFR-binding peptide
  MOD_RES (14)..(15): Xaa is C or S
YYLISTASLDQSVXXP

SEQ ID NO: 1265 - protein, 14 aa, Artificial Sequence
  Non-cyclic GFR-binding peptide
  MOD_RES (14)..(14): Xaa is C or S
FYLISIANLDQPVX

SEQ ID NO: 1266 - protein, 13 aa, Artificial Sequence
  Non-cyclic GFR-binding peptide
FYLISIANLDQPV

SEQ ID NO: 1267 - protein, 20 aa, Artificial Sequence
  Non-cyclic GFR-binding peptide
  MOD_RES (14)..(15): Xaa is C or S
KYLISIPSLDQPVXXPSASA

SEQ ID NO: 1268 - protein, 15 aa, Artificial Sequence
  Non-cyclic GFR-binding peptide
  MOD_RES (14)..(15): Xaa is C or S
YYLISTASLDQSVXX

SEQ ID NO: 1269 - protein, 15 aa, Artificial Sequence
  Non-cyclic GFR-binding peptide
  MOD_RES (14)..(15): Xaa is C or S
LYLVSIASLKTPAXX

SEQ ID NO: 1270 - protein, 19 aa, Artificial Sequence
  Non-cyclic GFR-binding peptide
  MOD_RES (14)..(15): Xaa is C or S
FYLVSIANLKTPVXXAKGV

SEQ ID NO: 1271 - protein, 16 aa, Artificial Sequence
  Non-cyclic GFR-binding peptide
  MOD_RES (14)..(15): Xaa is C or S
FYLVSIANLKTPVXXA

SEQ ID NO: 1272 - protein, 9 aa, Artificial Sequence
  Non-cyclic GFR-binding peptide
LYLISIASL

SEQ ID NO: 1273 - protein, 16 aa, Artificial Sequence
  Non-cyclic GFR-binding peptide
  MOD_RES (14)..(15): Xaa is C or S
KYLISIPSLDQSVXXP

SEQ ID NO: 1274 - protein, 10 aa, Artificial Sequence
  Non-cyclic GFR-binding peptide
FYLISIANLD

SEQ ID NO: 1275 - protein, 15 aa, Artificial Sequence
  Non-cyclic GFR-binding peptide
  MOD_RES (14)..(15): Xaa is C or S
LYLVSIASLQTPAXX

SEQ ID NO: 1276 - protein, 18 aa, Artificial Sequence
  Non-cyclic GFR-binding peptide
  MOD_RES (14)..(15): Xaa is C or S
LYLVSIASLQTPAXXPKP

SEQ ID NO: 1277 - protein, 20 aa, Artificial Sequence
  Non-cyclic GFR-binding peptide
  MOD_RES (14)..(15): Xaa is C or S
FYLISIANLAQPVXXPAASA

SEQ ID NO: 1278 - protein, 19 aa, Artificial Sequence
  Non-cyclic GFR-binding peptide
  MOD_RES (14)..(14): Xaa is C or S
LYLVSIASLKTPAXTPKTV

SEQ ID NO: 1279 - protein, 13 aa, Artificial Sequence
  Non-cyclic GFR-binding peptide
LYLVSIASLQVQT

SEQ ID NO: 1280 - protein, 20 aa, Artificial Sequence
  Non-cyclic GFR-binding peptide
  MOD_RES (14)..(15): Xaa is C or S
LYLISIASLAQPVXXPAASA

SEQ ID NO: 1281 - protein, 13 aa, Artificial Sequence
  Non-cyclic GFR-binding peptide
FYLVSIANLQVQT

SEQ ID NO: 1282 - protein, 18 aa, Artificial Sequence
  Non-cyclic GFR-binding peptide
  MOD_RES (14)..(15): Xaa is C or S
FYLISIANLDQSVXXPSA

SEQ ID NO: 1283 - protein, 12 aa, Artificial Sequence
  Non-cyclic GFR-binding peptide
LYLISIASLAQP

SEQ ID NO: 1284 - protein, 20 aa, Artificial Sequence
  Non-cyclic GFR-binding peptide
  MOD_RES (14)..(15): Xaa is C or S
YYLVSTASLKTPAXXPKPVY

SEQ ID NO: 1285 - protein, 16 aa, Artificial Sequence
  Non-cyclic GFR-binding peptide
  MOD_RES (14)..(15): Xaa is C or S
LYLVSIASLKTPVXXA

SEQ ID NO: 1286 - protein, 12 aa, Artificial Sequence
  Non-cyclic GFR-binding peptide
FYLISIANLAQP

SEQ ID NO: 1287 - protein, 12 aa, Artificial Sequence
  Non-cyclic GFR-binding peptide
LYLISIASLDQP

SEQ ID NO: 1288 - protein, 19 aa, Artificial Sequence
  Non-cyclic GFR-binding peptide
  MOD_RES (16)..(16): Xaa is C or S
FYLVSIANLQVQTPRXQVN

SEQ ID NO: 1289 - protein, 12 aa, Artificial Sequence
  Non-cyclic GFR-binding peptide
YYLVSTASLQTP

SEQ ID NO: 1290 - protein, 10 aa, Artificial Sequence
  Non-cyclic GFR-binding peptide
YYLMSTASLE

SEQ ID NO: 1291 - protein, 18 aa, Artificial Sequence
  Non-cyclic GFR-binding peptide
  MOD_RES (14)..(14): Xaa is C or S
LYLVSIASLKTPAXTPKT

SEQ ID NO: 1292 - protein, 19 aa, Artificial Sequence
  Non-cyclic GFR-binding peptide
  MOD_RES (14)..(15): Xaa is C or S
YYLMSTASLETPVXXAKPI

SEQ ID NO: 1293 - protein, 20 aa, Artificial Sequence
  Non-cyclic GFR-binding peptide
  MOD_RES (16)..(16): Xaa is C or S
LYLVSIASLQVQTPRXQVNR

SEQ ID NO: 1294 - protein, 15 aa, Artificial Sequence
  Non-cyclic GFR-binding peptide
LYLVSIASLQVQTPR

SEQ ID NO: 1295 - protein, 17 aa, Artificial Sequence
  Non-cyclic GFR-binding peptide
  MOD_RES (14)..(15): Xaa is C or S
LYLVSIASLQTPAXXPK

SEQ ID NO: 1296 - protein, 18 aa, Artificial Sequence
  Non-cyclic GFR-binding peptide
  MOD_RES (14)..(15): Xaa is C or S
LYLISIASLDQSVXXPSA

SEQ ID NO: 1297 - protein, 9 aa, Artificial Sequence
  Non-cyclic GFR-binding peptide
FYLISIANL

SEQ ID NO: 1298 - protein, 17 aa, Artificial Sequence
  Non-cyclic GFR-binding peptide
  MOD_RES (14)..(15): Xaa is C or S
YYLVSTASLKTPVXXAK

SEQ ID NO: 1299 - protein, 17 aa, Artificial Sequence
  Non-cyclic GFR-binding peptide
  MOD_RES (14)..(15): Xaa is C or S
KYLISIPSLDQSVXXPS

SEQ ID NO: 1300 - protein, 14 aa, Artificial Sequence
  Non-cyclic GFR-binding peptide
  MOD_RES (14)..(14): Xaa is C or S
FYLISIANLAQPVX

SEQ ID NO: 1301 - protein, 17 aa, Artificial Sequence
  Non-cyclic GFR-binding peptide
  MOD_RES (14)..(15): Xaa is C or S
LYLVSIASLKTPAXXAK

SEQ ID NO: 1302 - protein, 10 aa, Artificial Sequence
  Non-cyclic GFR-binding peptide
LYLVSIASLQ

SEQ ID NO: 1303 - protein, 15 aa, Artificial Sequence
  Non-cyclic GFR-binding peptide
  MOD_RES (14)..(15): Xaa is C or S
KYLVSIPSLKTPAXX

SEQ ID NO: 1304 - protein, 11 aa, Artificial Sequence
  Non-cyclic GFR-binding peptide
LYLVSIASLQV

SEQ ID NO: 1305 - protein, 12 aa, Artificial Sequence
  Non-cyclic GFR-binding peptide
LYLVSIASLQVQ

SEQ ID NO: 1306 - protein, 16 aa, Artificial Sequence
  Non-cyclic GFR-binding peptide
  MOD_RES (14)..(15): Xaa is C or S
KYLVSIPSLKTPAXXP

SEQ ID NO: 1307 - protein, 19 aa, Artificial Sequence
  Non-cyclic GFR-binding peptide
  MOD_RES (14)..(15): Xaa is C or S
KYLISIPSLAQPVXXPAAS

SEQ ID NO: 1308 - protein, 19 aa, Artificial Sequence
  Non-cyclic GFR-binding peptide
  MOD_RES (14)..(15): Xaa is C or S
FYLISIANLAQPVXXPAAS

SEQ ID NO: 1309 - protein, 19 aa, Artificial Sequence
  Non-cyclic GFR-binding peptide
  MOD_RES (14)..(15): Xaa is C or S
KYLMSIPSLETPVXXAKPI

SEQ ID NO: 1310 - protein, 13 aa, Artificial Sequence
  Non-cyclic GFR-binding peptide
KYLISIPSLDQPV

SEQ ID NO: 1311 - protein, 10 aa, Artificial Sequence
  Non-cyclic GFR-binding peptide
YYLVSTASLQ

SEQ ID NO: 1312 - protein, 19 aa, Artificial Sequence
  Non-cyclic GFR-binding peptide
  MOD_RES (16)..(16): Xaa is C or S
YYLVSTASLQVQTPRXQVN

SEQ ID NO: 1313 - protein, 14 aa, Artificial Sequence
  Non-cyclic GFR-binding peptide
  MOD_RES (14)..(14): Xaa is C or S
KYLVSIPSLQTPAX

SEQ ID NO: 1314 - protein, 12 aa, Artificial Sequence
  Non-cyclic GFR-binding peptide
FYLMSIANLETP

SEQ ID NO: 1315 - protein, 12 aa, Artificial Sequence
  Non-cyclic GFR-binding peptide
YYLVSTASLQVQ

SEQ ID NO: 1316 - protein, 17 aa, Artificial Sequence
  Non-cyclic GFR-binding peptide
  MOD_RES (14)..(15): Xaa is C or S
YYLISTASLDQPVXXPS

SEQ ID NO: 1317 - protein, 16 aa, Artificial Sequence
  Non-cyclic GFR-binding peptide
  MOD_RES (14)..(15): Xaa is C or S
KYLMSIPSLETPVXXA

SEQ ID NO: 1318 - protein, 19 aa, Artificial Sequence
  Non-cyclic GFR-binding peptide
  MOD_RES (16)..(16): Xaa is C or S
LYLVSIASLQVQTPRXQVN

SEQ ID NO: 1319 - protein, 15 aa, Artificial Sequence
  Non-cyclic GFR-binding peptide
YYLVSTASLQVQTPR

SEQ ID NO: 1320 - protein, 14 aa, Artificial Sequence
  Non-cyclic GFR-binding peptide
YYLVSTASLQVQTP

SEQ ID NO: 1321 - protein, 9 aa, Artificial Sequence
  Non-cyclic GFR-binding peptide
YYLISTASL

SEQ ID NO: 1322 - protein, 17 aa, Artificial Sequence
  Non-cyclic GFR-binding peptide
  MOD_RES (14)..(15): Xaa is C or S
YYLMSTASLETPVXXAK

SEQ ID NO: 1323 - protein, 18 aa, Artificial Sequence
  Non-cyclic GFR-binding peptide
  MOD_RES (14)..(14): Xaa is C or S
YYLVSTASLKTPAXTPKT

SEQ ID NO: 1324 - protein, 13 aa, Artificial Sequence
  Non-cyclic GFR-binding peptide
KYLMSIPSLETPV

SEQ ID NO: 1325 - protein, 16 aa, Artificial Sequence
  Non-cyclic GFR-binding peptide
  MOD_RES (16)..(16): Xaa is C or S
KYLVSIPSLQVQTPRX

SEQ ID NO: 1326 - protein, 13 aa, Artificial Sequence
  Non-cyclic GFR-binding peptide
FYLVSIANLKTPV

SEQ ID NO: 1327 - protein, 14 aa, Artificial Sequence
  Non-cyclic GFR-binding peptide
  MOD_RES (14)..(14): Xaa is C or S
KYLISIPSLDQSVX

SEQ ID NO: 1328 - protein, 19 aa, Artificial Sequence
  Non-cyclic GFR-binding peptide
  MOD_RES (14)..(15): Xaa is C or S
FYLVSIANLKTPAXXAKPV

SEQ ID NO: 1329 - protein, 12 aa, Artificial Sequence
  Non-cyclic GFR-binding peptide
FYLISIANLDQP

SEQ ID NO: 1330 - protein, 14 aa, Artificial Sequence
  Non-cyclic GFR-binding peptide
  MOD_RES (14)..(14): Xaa is C or S
LYLVSIASLKTPAX

SEQ ID NO: 1331 - protein, 16 aa, Artificial Sequence
  Non-cyclic GFR-binding peptide
  MOD_RES (16)..(16): Xaa is C or S
FYLVSIANLQVQTPRX

SEQ ID NO: 1332 - protein, 17 aa, Artificial Sequence
  Non-cyclic GFR-binding peptide
  MOD_RES (14)..(15): Xaa is C or S
LYLISIASLDQPVXXPS

SEQ ID NO: 1333 - protein, 19 aa, Artificial Sequence
  Non-cyclic GFR-binding peptide
  MOD_RES (14)..(15): Xaa is C or S
LYLVSIASLKTPAXXPKPV

SEQ ID NO: 1334 - protein, 19 aa, Artificial Sequence
  Non-cyclic GFR-binding peptide
  MOD_RES (14)..(15): Xaa is C or S
FYLMSIANLETPVXXAKPI

SEQ ID NO: 1335 - protein, 14 aa, Artificial Sequence
  Non-cyclic GFR-binding peptide
  MOD_RES (14)..(14): Xaa is C or S
YYLVSTASLKTPVX

SEQ ID NO: 1336 - protein, 20 aa, Artificial Sequence
  Non-cyclic GFR-binding peptide
  MOD_RES (14)..(15): Xaa is C or S
KYLMSIPSLETPVXXAKPIS

SEQ ID NO: 1337 - protein, 19 aa, Artificial Sequence
  Non-cyclic GFR-binding peptide
  MOD_RES (14)..(15): Xaa is C or S
FYLISIANLDQPVXXPSAS

SEQ ID NO: 1338 - protein, 19 aa, Artificial Sequence
  Non-cyclic GFR-binding peptide
  MOD_RES (14)..(15): Xaa is C or S
LYLVSIASLKTPVXXAKGV

SEQ ID NO: 1339 - protein, 20 aa, Artificial Sequence
  Non-cyclic GFR-binding peptide
  MOD_RES (14)..(15): Xaa is C or S
FYLMSIANLETPVXXAKPIS

SEQ ID NO: 1340 - protein, 19 aa, Artificial Sequence
  Non-cyclic GFR-binding peptide
  MOD_RES (14)..(15): Xaa is C or S
KYLVSIPSLKTPAXXAKPV

SEQ ID NO: 1341 - protein, 16 aa, Artificial Sequence
  Non-cyclic GFR-binding peptide
  MOD_RES (14)..(15): Xaa is C or S
FYLMSIANLETPVXXA

SEQ ID NO: 1342 - protein, 17 aa, Artificial Sequence
  Non-cyclic GFR-binding peptide
  MOD_RES (14)..(15): Xaa is C or S
YYLISTASLAQPVXXPA

SEQ ID NO: 1343 - protein, 15 aa, Artificial Sequence
  Non-cyclic GFR-binding peptide
  MOD_RES (14)..(15): Xaa is C or S
LYLISIASLDQPVXX

SEQ ID NO: 1344 - protein, 10 aa, Artificial Sequence
  Non-cyclic GFR-binding peptide
LYLISIASLD

SEQ ID NO: 1345 - protein, 17 aa, Artificial Sequence
  Non-cyclic GFR-binding peptide
  MOD_RES (14)..(15): Xaa is C or S
LYLVSIASLKTPVXXAK

SEQ ID NO: 1346 - protein, 19 aa, Artificial Sequence
  Non-cyclic GFR-binding peptide
  MOD_RES (14)..(15): Xaa is C or S
KYLISIPSLDQPVXXPSAS

SEQ ID NO: 1347 - protein, 9 aa, Artificial Sequence
  Non-cyclic GFR-binding peptide
FYLMSIANL

SEQ ID NO: 1348 - protein, 20 aa, Artificial Sequence
  Non-cyclic GFR-binding peptide
  MOD_RES (14)..(15): Xaa is C or S
LYLVSIASLKTPAXXAKPVA

SEQ ID NO: 1349 - protein, 20 aa, Artificial Sequence
  Non-cyclic GFR-binding peptide
  MOD_RES (14)..(15): Xaa is C or S
KYLVSIPSLKTPAXXPKPVY

SEQ ID NO: 1350 - protein, 10 aa, Artificial Sequence
  Non-cyclic GFR-binding peptide
YYLISTASLD

SEQ ID NO: 1351 - protein, 16 aa, Artificial Sequence
  Non-cyclic GFR-binding peptide
  MOD_RES (14)..(15): Xaa is C or S
FYLVSIANLKTPAXXA

SEQ ID NO: 1352 - protein, 16 aa, Artificial Sequence
  Non-cyclic GFR-binding peptide
  MOD_RES (14)..(14): Xaa is C or S
YYLVSTASLKTPAXTP

SEQ ID NO: 1353 - protein, 11 aa, Artificial Sequence
  Non-cyclic GFR-binding peptide
YYLVSTASLQT

SEQ ID NO: 1354 - protein, 17 aa, Artificial Sequence
  Non-cyclic GFR-binding peptide
  MOD_RES (14)..(15): Xaa is C or S
LYLISIASLAQPVXXPA

SEQ ID NO: 1355 - protein, 15 aa, Artificial Sequence
  Non-cyclic GFR-binding peptide
  MOD_RES (14)..(15): Xaa is C or S
LYLVSIASLKTPVXX

SEQ ID NO: 1356 - protein, 16 aa, Artificial Sequence
  Non-cyclic GFR-binding peptide
  MOD_RES (14)..(14): Xaa is C or S
LYLVSIASLKTPAXTP

SEQ ID NO: 1357 - protein, 14 aa, Artificial Sequence
  Non-cyclic GFR-binding peptide
  MOD_RES (14)..(14): Xaa is C or S
LYLISIASLDQSVX

SEQ ID NO: 1358 - protein, 15 aa, Artificial Sequence
  Non-cyclic GFR-binding peptide
  MOD_RES (14)..(15): Xaa is C or S
FYLVSIANLKTPVXX

SEQ ID NO: 1359 - protein, 19 aa, Artificial Sequence
  Non-cyclic GFR-binding peptide
  MOD_RES (14)..(15): Xaa is C or S
YYLVSTASLKTPVXXAKGV

SEQ ID NO: 1360 - protein, 9 aa, Artificial Sequence
  Non-cyclic GFR-binding peptide
LYLVSIASL

SEQ ID NO: 1361 - protein, 11 aa, Artificial Sequence
  Non-cyclic GFR-binding peptide
KYLVSIPSLQV

SEQ ID NO: 1362 - protein, 11 aa, Artificial Sequence
  Non-cyclic GFR-binding peptide
LYLISIASLAQ

SEQ ID NO: 1363 - protein, 11 aa, Artificial Sequence
  Non-cyclic GFR-binding peptide
KYLVSIPSLQT

SEQ ID NO: 1364 - protein, 16 aa, Artificial Sequence
  Non-cyclic GFR-binding peptide
  MOD_RES (14)..(15): Xaa is C or S
LYLISIASLDQPVXXP

SEQ ID NO: 1365 - protein, 20 aa, Artificial Sequence
  Non-cyclic GFR-binding peptide
  MOD_RES (14)..(15): Xaa is C or S
YYLISTASLDQPVXXPSASA

SEQ ID NO: 1366 - protein, 17 aa, Artificial Sequence
  Non-cyclic GFR-binding peptide
  MOD_RES (14)..(15): Xaa is C or S
YYLVSTASLKTPAXXPK

SEQ ID NO: 1367 - protein, 15 aa, Artificial Sequence
  Non-cyclic GFR-binding peptide
  MOD_RES (14)..(15): Xaa is C or S
YYLVSTASLKTPVXX

SEQ ID NO: 1368 - protein, 19 aa, Artificial Sequence
  Non-cyclic GFR-binding peptide
  MOD_RES (14)..(15): Xaa is C or S
KYLVSIPSLQTPAXXPKPV

SEQ ID NO: 1369 - protein, 20 aa, Artificial Sequence
  Non-cyclic GFR-binding peptide
  MOD_RES (14)..(15): Xaa is C or S
LYLVSIASLKTPVXXAKGVK

SEQ ID NO: 1370 - protein, 20 aa, Artificial Sequence
  Non-cyclic GFR-binding peptide
  MOD_RES (14)..(15): Xaa is C or S
LYLISIASLDQSVXXPSASA

SEQ ID NO: 1371 - protein, 18 aa, Artificial Sequence
  Non-cyclic GFR-binding peptide
  MOD_RES (14)..(15): Xaa is C or S
FYLISIANLAQPVXXPAA

SEQ ID NO: 1372 - protein, 16 aa, Artificial Sequence
  Non-cyclic GFR-binding peptide
  MOD_RES (14)..(15): Xaa is C or S
KYLVSIPSLKTPAXXA

SEQ ID NO: 1373 - protein, 16 aa, Artificial Sequence
  Non-cyclic GFR-binding peptide
  MOD_RES (14)..(14): Xaa is C or S
KYLVSIPSLKTPAXTP

SEQ ID NO: 1374 - protein, 15 aa, Artificial Sequence
  Non-cyclic GFR-binding peptide
  MOD_RES (14)..(15): Xaa is C or S
FYLISIANLDQSVXX

SEQ ID NO: 1375 - protein, 19 aa, Artificial Sequence
  Non-cyclic GFR-binding peptide
  MOD_RES (14)..(15): Xaa is C or S
KYLVSIPSLKTPAXXPKPV

SEQ ID NO: 1376 - protein, 15 aa, Artificial Sequence
  Non-cyclic GFR-binding peptide
  MOD_RES (14)..(15): Xaa is C or S
YYLISTASLDQPVXX

SEQ ID NO: 1377 - protein, 16 aa, Artificial Sequence
  Non-cyclic GFR-binding peptide
  MOD_RES (14)..(15): Xaa is C or S
LYLVSIASLKTPAXXP

SEQ ID NO: 1378 - protein, 13 aa, Artificial Sequence
  Non-cyclic GFR-binding peptide
LYLVSIASLKTPV

SEQ ID NO: 1379 - protein, 13 aa, Artificial Sequence
  Non-cyclic GFR-binding peptide
YYLISTASLDQPV

SEQ ID NO: 1380 - protein, 12 aa, Artificial Sequence
  Non-cyclic GFR-binding peptide
KYLVSIPSLQVQ

SEQ ID NO: 1381 - protein, 20 aa, Artificial Sequence
  Non-cyclic GFR-binding peptide
  MOD_RES (14)..(15): Xaa is C or S
YYLVSTASLKTPVXXAKGVK

SEQ ID NO: 1382 - protein, 11 aa, Artificial Sequence
  Non-cyclic GFR-binding peptide
FYLISIANLAQ

SEQ ID NO: 1383 - protein, 20 aa, Artificial Sequence
  Non-cyclic GFR-binding peptide
  MOD_RES (14)..(15): Xaa is C or S
FYLISIANLDQSVXXPSASA

SEQ ID NO: 1384 - protein, 14 aa, Artificial Sequence
  Non-cyclic GFR-binding peptide
LYLVSIASLQVQTP

SEQ ID NO: 1385 - protein, 10 aa, Artificial Sequence
  Non-cyclic GFR-binding peptide
KYLVSIPSLQ

SEQ ID NO: 1386 - protein, 11 aa, Artificial Sequence
  Non-cyclic GFR-binding peptide
LYLVSIASLQT

SEQ ID NO: 1387 - protein, 14 aa, Artificial Sequence
  Non-cyclic GFR-binding peptide
  MOD_RES (14)..(14): Xaa is C or S
LYLVSIASLQTPAX

SEQ ID NO: 1388 - protein, 13 aa, Artificial Sequence
  Non-cyclic GFR-binding peptide
FYLISIANLDQSV

SEQ ID NO: 1389 - protein, 11 aa, Artificial Sequence
  Non-cyclic GFR-binding peptide
LYLISIASLDQ

SEQ ID NO: 1390 - protein, 16 aa, Artificial Sequence
  Non-cyclic GFR-binding peptide
  MOD_RES (14)..(15): Xaa is C or S
KYLISIPSLDQPVXXP

SEQ ID NO: 1391 - protein, 15 aa, Artificial Sequence
  Non-cyclic GFR-binding peptide
  MOD_RES (14)..(15): Xaa is C or S
KYLISIPSLDQSVXX

SEQ ID NO: 1392 - protein, 18 aa, Artificial Sequence
  Non-cyclic GFR-binding peptide
  MOD_RES (14)..(15): Xaa is C or S
FYLISIANLDQPVXXPSA

SEQ ID NO: 1393 - protein, 11 aa, Artificial Sequence
  Non-cyclic GFR-binding peptide
KYLISIPSLAQ

SEQ ID NO: 1394 - protein, 20 aa, Artificial Sequence
  Non-cyclic GFR-binding peptide
  MOD_RES (14)..(15): Xaa is C or S
KYLISIPSLDQSVXXPSASA

SEQ ID NO: 1395 - protein, 15 aa, Artificial Sequence
  Non-cyclic GFR-binding peptide
  MOD_RES (14)..(15): Xaa is C or S
YYLMSTASLETPVXX

SEQ ID NO: 1396 - protein, 17 aa, Artificial Sequence
  Non-cyclic GFR-binding peptide
  MOD_RES (14)..(14): Xaa is C or S
KYLVSIPSLKTPAXTPK

SEQ ID NO: 1397 - protein, 14 aa, Artificial Sequence
  Non-cyclic GFR-binding peptide
  MOD_RES (14)..(14): Xaa is C or S
YYLISTASLDQSVX

SEQ ID NO: 1398 - protein, 16 aa, Artificial Sequence
  Non-cyclic GFR-binding peptide
  MOD_RES (14)..(15): Xaa is C or S
FYLISIANLDQPVXXP

SEQ ID NO: 1399 - protein, 13 aa, Artificial Sequence
  Non-cyclic GFR-binding peptide
KYLISIPSLDQSV

SEQ ID NO: 1400 - protein, 13 aa, Artificial Sequence
  Non-cyclic GFR-binding peptide
YYLMSTASLETPV

SEQ ID NO: 1401 - protein, 14 aa, Artificial Sequence
  Non-cyclic GFR-binding peptide
  MOD_RES (14)..(14): Xaa is C or S
YYLVSTASLQTPAX

SEQ ID NO: 1402 - protein, 9 aa, Artificial Sequence
  Non-cyclic GFR-binding peptide
KYLISIPSL

SEQ ID NO: 1403 - protein, 16 aa, Artificial Sequence
  Non-cyclic GFR-binding peptide
  MOD_RES (16)..(16): Xaa is C or S
YYLVSTASLQVQTPRX

SEQ ID NO: 1404 - protein, 15 aa, Artificial Sequence
  Non-cyclic GFR-binding peptide
  MOD_RES (14)..(15): Xaa is C or S
KYLISIPSLAQPVXX

SEQ ID NO: 1405 - protein, 16 aa, Artificial Sequence
  Non-cyclic GFR-binding peptide
  MOD_RES (14)..(15): Xaa is C or S
KYLVSIPSLQTPAXXP

SEQ ID NO: 1406 - protein, 12 aa, Artificial Sequence
  Non-cyclic GFR-binding peptide
FYLVSIANLQVQ

SEQ ID NO: 1407 - protein, 16 aa, Artificial Sequence
  Non-cyclic GFR-binding peptide
  MOD_RES (14)..(15): Xaa is C or S
YYLMSTASLETPVXXA

SEQ ID NO: 1408 - protein, 19 aa, Artificial Sequence
  Non-cyclic GFR-binding peptide
  MOD_RES (14)..(15): Xaa is C or S
FYLISIANLDQSVXXPSAS

SEQ ID NO: 1409 - protein, 17 aa, Artificial Sequence
  Non-cyclic GFR-binding peptide
  MOD_RES (14)..(14): Xaa is C or S
YYLVSTASLKTPAXTPK

SEQ ID NO: 1410 - protein, 18 aa, Artificial Sequence
  Non-cyclic GFR-binding peptide
  MOD_RES (14)..(15): Xaa is C or S
KYLISIPSLAQPVXXPAA

SEQ ID NO: 1411 - protein, 20 aa, Artificial Sequence
  Non-cyclic GFR-binding peptide
  MOD_RES (14)..(14): Xaa is C or S
YYLVSTASLKTPAXTPKTVH

SEQ ID NO: 1412 - protein, 14 aa, Artificial Sequence
  Non-cyclic GFR-binding peptide
KYLVSIPSLQVQTP

SEQ ID NO: 1413 - protein, 13 aa, Artificial Sequence
  Non-cyclic GFR-binding peptide
YYLVSTASLKTPV

SEQ ID NO: 1414 - protein, 20 aa, Artificial Sequence
  Non-cyclic GFR-binding peptide
  MOD_RES (14)..(15): Xaa is C or S
LYLVSIASLKTPAXXPKPVY

SEQ ID NO: 1415 - protein, 16 aa, Artificial Sequence
  Non-cyclic GFR-binding peptide
  MOD_RES (14)..(15): Xaa is C or S
FYLISIANLAQPVXXP

SEQ ID NO: 1416 - protein, 10 aa, Artificial Sequence
  Non-cyclic GFR-binding peptide
LYLVSIASLK

SEQ ID NO: 1417 - protein, 14 aa, Artificial Sequence
  Non-cyclic GFR-binding peptide
  MOD_RES (14)..(14): Xaa is C or S
KYLVSIPSLKTPAX

SEQ ID NO: 1418 - protein, 15 aa, Artificial Sequence
  Non-cyclic GFR-binding peptide
  MOD_RES (14)..(15): Xaa is C or S
LYLISIASLDQSVXX

SEQ ID NO: 1419 - protein, 18 aa, Artificial Sequence
  Non-cyclic GFR-binding peptide
  MOD_RES (14)..(15): Xaa is C or S
KYLVSIPSLQTPAXXPKP

SEQ ID NO: 1420 - protein, 20 aa, Artificial Sequence
  Non-cyclic GFR-binding peptide
  MOD_RES (14)..(15): Xaa is C or S
FYLVSIANLKTPVXXAKGVK

SEQ ID NO: 1421 - protein, 13 aa, Artificial Sequence
  Non-cyclic GFR-binding peptide
KYLVSIPSLQTPA

SEQ ID NO: 1422 - protein, 18 aa, Artificial Sequence
  Non-cyclic GFR-binding peptide
  MOD_RES (14)..(15): Xaa is C or S
YYLISTASLDQSVXXPSA

SEQ ID NO: 1423 - protein, 10 aa, Artificial Sequence
  Non-cyclic GFR-binding peptide
KYLISIPSLA

SEQ ID NO: 1424 - protein, 18 aa, Artificial Sequence
  Non-cyclic GFR-binding peptide
  MOD_RES (14)..(15): Xaa is C or S
YYLMSTASLETPVXXAKP

SEQ ID NO: 1425 - protein, 17 aa, Artificial Sequence
  Non-cyclic GFR-binding peptide
  MOD_RES (14)..(15): Xaa is C or S
KYLVSIPSLKTPAXXAK

SEQ ID NO: 1426 - protein, 12 aa, Artificial Sequence
  Non-cyclic GFR-binding peptide
YYLISTASLAQP

SEQ ID NO: 1427 - protein, 14 aa, Artificial Sequence
  Non-cyclic GFR-binding peptide
  MOD_RES (14)..(14): Xaa is C or S
YYLISTASLAQPVX

SEQ ID NO: 1428 - protein, 12 aa, Artificial Sequence
  Non-cyclic GFR-binding peptide
KYLISIPSLDQP

SEQ ID NO: 1429 - protein, 13 aa, Artificial Sequence
  Non-cyclic GFR-binding peptide
KYLISIPSLAQPV

SEQ ID NO: 1430 - protein, 13 aa, Artificial Sequence
  Non-cyclic GFR-binding peptide
YYLVSTASLQVQT

SEQ ID NO: 1431 - protein, 20 aa, Artificial Sequence
  Non-cyclic GFR-binding peptide
  MOD_RES (14)..(15): Xaa is C or S
YYLISTASLAQPVXXPAASA

SEQ ID NO: 1432 - protein, 15 aa, Artificial Sequence
  Non-cyclic GFR-binding peptide
  MOD_RES (14)..(15): Xaa is C or S
KYLVSIPSLQTPAXX

SEQ ID NO: 1433 - protein, 11 aa, Artificial Sequence
  Non-cyclic GFR-binding peptide
YYLMSTASLET

SEQ ID NO: 1434 - protein, 19 aa, Artificial Sequence
  Non-cyclic GFR-binding peptide
  MOD_RES (14)..(15): Xaa is C or S
LYLISIASLAQPVXXPAAS

SEQ ID NO: 1435 - protein, 15 aa, Artificial Sequence
  Non-cyclic GFR-binding peptide
  MOD_RES (14)..(15): Xaa is C or S
FYLMSIANLETPVXX

SEQ ID NO: 1436 - protein, 18 aa, Artificial Sequence
  Non-cyclic GFR-binding peptide
  MOD_RES (14)..(15): Xaa is C or S
YYLVSTASLKTPAXXPKP

SEQ ID NO: 1437 - protein, 14 aa, Artificial Sequence
  Non-cyclic GFR-binding peptide
  MOD_RES (14)..(14): Xaa is C or S
KYLISIPSLDQPVX

SEQ ID NO: 1438 - protein, 20 aa, Artificial Sequence
  Non-cyclic GFR-binding peptide
  MOD_RES (14)..(15): Xaa is C or S
LYLISIASLDQPVXXPSASA

SEQ ID NO: 1439 - protein, 19 aa, Artificial Sequence
  Non-cyclic GFR-binding peptide
  MOD_RES (14)..(14): Xaa is C or S
KYLVSIPSLKTPAXTPKTV

SEQ ID NO: 1440 - protein, 15 aa, Artificial Sequence
  Non-cyclic GFR-binding peptide
  MOD_RES (14)..(14): Xaa is C or S
LYLVSIASLKTPAXT

SEQ ID NO: 1441 - protein, 18 aa, Artificial Sequence
  Non-cyclic GFR-binding peptide
  MOD_RES (14)..(15): Xaa is C or S
KYLVSIPSLKTPAXXAKP

SEQ ID NO: 1442 - protein, 12 aa, Artificial Sequence
  Non-cyclic GFR-binding peptide
LYLVSIASLKTP

SEQ ID NO: 1443 - protein, 15 aa, Artificial Sequence
  Non-cyclic GFR-binding peptide
  MOD_RES (14)..(15): Xaa is C or S
KYLISIPSLDQPVXX

SEQ ID NO: 1444 - protein, 15 aa, Artificial Sequence
  Non-cyclic GFR-binding peptide
KYLVSIPSLQVQTPR

SEQ ID NO: 1445 - protein, 17 aa, Artificial Sequence
  Non-cyclic GFR-binding peptide
  MOD_RES (16)..(16): Xaa is C or S
FYLVSIANLQVQTPRXQ

SEQ ID NO: 1446 - protein, 13 aa, Artificial Sequence
  Non-cyclic GFR-binding peptide
FYLMSIANLETPV

SEQ ID NO: 1447 - protein, 19 aa, Artificial Sequence
  Non-cyclic GFR-binding peptide
  MOD_RES (14)..(15): Xaa is C or S
YYLVSTASLKTPAXXPKPV

SEQ ID NO: 1448 - protein, 20 aa, Artificial Sequence
  Non-cyclic GFR-binding peptide
  MOD_RES (14)..(15): Xaa is C or S
KYLISIPSLAQPVXXPAASA

SEQ ID NO: 1449 - protein, 18 aa, Artificial Sequence
  Non-cyclic GFR-binding peptide
  MOD_RES (14)..(15): Xaa is C or S
YYLVSTASLQTPAXXPKP

SEQ ID NO: 1450 - protein, 20 aa, Artificial Sequence
  Non-cyclic GFR-binding peptide
  MOD_RES (14)..(15): Xaa is C or S
KYLMSIPSLETPVXXAKPIK

SEQ ID NO: 1451 - protein, 17 aa, Artificial Sequence
  Non-cyclic GFR-binding peptide
  MOD_RES (14)..(15): Xaa is C or S
YYLVSTASLQTPAXXPK

SEQ ID NO: 1452 - protein, 20 aa, Artificial Sequence
  Non-cyclic GFR-binding peptide
  MOD_RES (14)..(15): Xaa is C or S
YYLISTASLDQSVXXPSASA

SEQ ID NO: 1453 - protein, 16 aa, Artificial Sequence
  Non-cyclic GFR-binding peptide
  MOD_RES (14)..(15): Xaa is C or S
YYLVSTASLKTPVXXA

SEQ ID NO: 1454 - protein, 12 aa, Artificial Sequence
  Non-cyclic GFR-binding peptide
KYLISIPSLDQS

SEQ ID NO: 1455 - protein, 20 aa, Artificial Sequence
  Non-cyclic GFR-binding peptide
  MOD_RES (14)..(15): Xaa is C or S
YYLMSTASLETPVXXAKPIK

SEQ ID NO: 1456 - protein, 17 aa, Artificial Sequence
  Non-cyclic GFR-binding peptide
  MOD_RES (14)..(15): Xaa is C or S
KYLVSIPSLKTPAXXPK

SEQ ID NO: 1457 - protein, 17 aa, Artificial Sequence
  Non-cyclic GFR-binding peptide
  MOD_RES (14)..(15): Xaa is C or S
KYLVSIPSLQTPAXXPK

SEQ ID NO: 1458 - protein, 12 aa, Artificial Sequence
  Non-cyclic GFR-binding peptide
YYLISTASLDQP

SEQ ID NO: 1459 - protein, 16 aa, Artificial Sequence
  Non-cyclic GFR-binding peptide
  MOD_RES (14)..(15): Xaa is C or S
FYLISIANLDQSVXXP

SEQ ID NO: 1460 - protein, 14 aa, Artificial Sequence
  Non-cyclic GFR-binding peptide
  MOD_RES (14)..(14): Xaa is C or S
YYLISTASLDQPVX

SEQ ID NO: 1461 - protein, 18 aa, Artificial Sequence
  Non-cyclic GFR-binding peptide
  MOD_RES (16)..(16): Xaa is C or S
KYLVSIPSLQVQTPRXQV

SEQ ID NO: 1462 - protein, 14 aa, Artificial Sequence
  Non-cyclic GFR-binding peptide
  MOD_RES (14)..(14): Xaa is C or S
KYLISIPSLAQPVX

SEQ ID NO: 1463 - protein, 14 aa, Artificial Sequence
  Non-cyclic GFR-binding peptide
  MOD_RES (14)..(14): Xaa is C or S
FYLMSIANLETPVX

SEQ ID NO: 1464 - protein, 17 aa, Artificial Sequence
  Non-cyclic GFR-binding peptide
  MOD_RES (14)..(15): Xaa is C or S
LYLISIASLDQSVXXPS

SEQ ID NO: 1465 - protein, 13 aa, Artificial Sequence
  Non-cyclic GFR-binding peptide
KYLVSIPSLQVQT

SEQ ID NO: 1466 - protein, 20 aa, Artificial Sequence
  Non-cyclic GFR-binding peptide
  MOD_RES (16)..(16): Xaa is C or S
KYLVSIPSLQVQTPRXQVNR

SEQ ID NO: 1467 - protein, 20 aa, Artificial Sequence
  Non-cyclic GFR-binding peptide
  MOD_RES (14)..(15): Xaa is C or S
FYLISIANLDQPVXXPSASA

SEQ ID NO: 1468 - protein, 12 aa, Artificial Sequence
  Non-cyclic GFR-binding peptide
LYLVSIASLQTP

SEQ ID NO: 1469 - protein, 18 aa, Artificial Sequence
  Non-cyclic GFR-binding peptide
  MOD_RES (14)..(14): Xaa is C or S
KYLVSIPSLKTPAXTPKT

SEQ ID NO: 1470 - protein, 18 aa, Artificial Sequence
  Non-cyclic GFR-binding peptide
  MOD_RES (14)..(15): Xaa is C or S
KYLVSIPSLKTPAXXPKP

SEQ ID NO: 1471 - protein, 14 aa, Artificial Sequence
  Non-cyclic GFR-binding peptide
  MOD_RES (14)..(14): Xaa is C or S
FYLVSIANLKTPVX

SEQ ID NO: 1472 - protein, 10 aa, Artificial Sequence
  Non-cyclic GFR-binding peptide
KYLISIPSLD

SEQ ID NO: 1473 - protein, 15 aa, Artificial Sequence
  Non-cyclic GFR-binding peptide
  MOD_RES (14)..(15): Xaa is C or S
YYLVSTASLQTPAXX

SEQ ID NO: 1474 - protein, 14 aa, Artificial Sequence
  Non-cyclic GFR-binding peptide
  MOD_RES (14)..(14): Xaa is C or S
LYLVSIASLKTPVX

SEQ ID NO: 1475 - protein, 20 aa, Artificial Sequence
  Non-cyclic GFR-binding peptide
  MOD_RES (14)..(14): Xaa is C or S
KYLVSIPSLKTPAXTPKTVH

SEQ ID NO: 1476 - protein, 13 aa, Artificial Sequence
  Non-cyclic GFR-binding peptide
KYLVSIPSLKTPA

SEQ ID NO: 1477 - protein, 19 aa, Artificial Sequence
  Non-cyclic GFR-binding peptide
  MOD_RES (14)..(14): Xaa is C or S
YYLVSTASLKTPAXTPKTV

SEQ ID NO: 1478 - protein, 16 aa, Artificial Sequence
  Non-cyclic GFR-binding peptide
  MOD_RES (14)..(15): Xaa is C or S
LYLISIASLDQSVXXP

SEQ ID NO: 1479 - protein, 13 aa, Artificial Sequence
  Non-cyclic GFR-binding peptide
YYLVSTASLQTPA

SEQ ID NO: 1480 - protein, 19 aa, Artificial Sequence
  Non-cyclic GFR-binding peptide
  MOD_RES (16)..(16): Xaa is C or S
KYLVSIPSLQVQTPRXQVN

SEQ ID NO: 1481 - protein, 17 aa, Artificial Sequence
  Non-cyclic GFR-binding peptide
  MOD_RES (14)..(15): Xaa is C or S
FYLISIANLDQSVXXPS

SEQ ID NO: 1482 - protein, 11 aa, Artificial Sequence
  Non-cyclic GFR-binding peptide
YYLVSTASLQV

SEQ ID NO: 1483 - protein, 18 aa, Artificial Sequence
  Non-cyclic GFR-binding peptide
  MOD_RES (4)..(5): Xaa is C or S
PKAXXVPTELSPISMLYK

SEQ ID NO: 1484 - protein, 13 aa, Artificial Sequence
  Non-cyclic GFR-binding peptide
APTQLSAISVLYL

SEQ ID NO: 1485 - protein, 10 aa, Artificial Sequence
  Non-cyclic GFR-binding peptide
ALSATSILYY

SEQ ID NO: 1486 - protein, 10 aa, Artificial Sequence
  Non-cyclic GFR-binding peptide
ELSPISMLYK

SEQ ID NO: 1487 - protein, 18 aa, Artificial Sequence
  Non-cyclic GFR-binding peptide
  MOD_RES (4)..(5): Xaa is C or S
ASPXXVSQDLSPISILYK

SEQ ID NO: 1488 - protein, 19 aa, Artificial Sequence
  Non-cyclic GFR-binding peptide
  MOD_RES (5)..(6): Xaa is C or S
SASPXXVSQDLSATSILYY

SEQ ID NO: 1489 - protein, 19 aa, Artificial Sequence
  Non-cyclic GFR-binding peptide
  MOD_RES (5)..(6): Xaa is C or S
SASPXXVSQDLSAISILYL

SEQ ID NO: 1490 - protein, 11 aa, Artificial Sequence
  Non-cyclic GFR-binding peptide
QDLNAISILYF

SEQ ID NO: 1491 - protein, 13 aa, Artificial Sequence
  Non-cyclic GFR-binding peptide
VPQALSAISILYL

SEQ ID NO: 1492 - protein, 10 aa, Artificial Sequence
  Non-cyclic GFR-binding peptide
ALSAISILYL

SEQ ID NO: 1493 - protein, 16 aa, Artificial Sequence
  Non-cyclic GFR-binding peptide
  MOD_RES (2)..(3): Xaa is C or S
PXXAPTQLSATSVLYY

SEQ ID NO: 1494 - protein, 16 aa, Artificial Sequence
  Non-cyclic GFR-binding peptide
  MOD_RES (2)..(3): Xaa is C or S
PXXVPQALSATSILYY

SEQ ID NO: 1495 - protein, 12 aa, Artificial Sequence
  Non-cyclic GFR-binding peptide
PQALSPISILYK

SEQ ID NO: 1496 - protein, 13 aa, Artificial Sequence
  Non-cyclic GFR-binding peptide
VSQDLSATSILYY

SEQ ID NO: 1497 - protein, 10 aa, Artificial Sequence
  Non-cyclic GFR-binding peptide
ELNAISMLYF

SEQ ID NO: 1498 - protein, 18 aa, Artificial Sequence
  Non-cyclic GFR-binding peptide
  MOD_RES (4)..(5): Xaa is C or S
ASPXXVPQDLSATSILYY

SEQ ID NO: 1499 - protein, 18 aa, Artificial Sequence
  Non-cyclic GFR-binding peptide
  MOD_RES (4)..(5): Xaa is C or S
AAPXXVPQALSATSILYY

SEQ ID NO: 1500 - protein, 20 aa, Artificial Sequence
  Non-cyclic GFR-binding peptide
  MOD_RES (6)..(7): Xaa is C or S
TVPKPXXAPTQLSATSVLYY

SEQ ID NO: 1501 - protein, 12 aa, Artificial Sequence
  Non-cyclic GFR-binding peptide
SQDLSAISILYL

SEQ ID NO: 1502 - protein, 18 aa, Artificial Sequence
  Non-cyclic GFR-binding peptide
  MOD_RES (4)..(5): Xaa is C or S
PKAXXAPTKLNAISVLYF

SEQ ID NO: 1503 - protein, 17 aa, Artificial Sequence
  Non-cyclic GFR-binding peptide
  MOD_RES (2)..(2): Xaa is C or S
QXRPTQVQLSPISVLYK

SEQ ID NO: 1504 - protein, 20 aa, Artificial Sequence
  Non-cyclic GFR-binding peptide
  MOD_RES (5)..(5): Xaa is C or S
RNVQXRPTQVQLSATSVLYY

SEQ ID NO: 1505 - protein, 18 aa, Artificial Sequence
  Non-cyclic GFR-binding peptide
  MOD_RES (3)..(3): Xaa is C or S
VQXRPTQVQLSAISVLYL

SEQ ID NO: 1506 - protein, 16 aa, Artificial Sequence
  Non-cyclic GFR-binding peptide
  MOD_RES (2)..(3): Xaa is C or S
PXXVPQALSAISILYL

SEQ ID NO: 1507 - protein, 12 aa, Artificial Sequence
  Non-cyclic GFR-binding peptide
PTQLSPISVLYK

SEQ ID NO: 1508 - protein, 16 aa, Artificial Sequence
  Non-cyclic GFR-binding peptide
  MOD_RES (2)..(3): Xaa is C or S
PXXAPTQLSAISVLYL

SEQ ID NO: 1509 - protein, 17 aa, Artificial Sequence
  Non-cyclic GFR-binding peptide
  MOD_RES (2)..(2): Xaa is C or S
QXRPTQVQLSAISVLYL

SEQ ID NO: 1510 - protein, 19 aa, Artificial Sequence
  Non-cyclic GFR-binding peptide
  MOD_RES (5)..(6): Xaa is C or S
VPKPXXAPTQLSATSVLYY

SEQ ID NO: 1511 - protein, 13 aa, Artificial Sequence
  Non-cyclic GFR-binding peptide
VSQDLSAISILYL

SEQ ID NO: 1512 - protein, 14 aa, Artificial Sequence
  Non-cyclic GFR-binding peptide
PTQVQLNAISVLYF

SEQ ID NO: 1513 - protein, 17 aa, Artificial Sequence
  Non-cyclic GFR-binding peptide
  MOD_RES (3)..(4): Xaa is C or S
SPXXVPQDLNAISILYF

SEQ ID NO: 1514 - protein, 16 aa, Artificial Sequence
  Non-cyclic GFR-binding peptide
  MOD_RES (2)..(3): Xaa is C or S
AXXAPTKLSAISVLYL

SEQ ID NO: 1515 - protein, 20 aa, Artificial Sequence
  Non-cyclic GFR-binding peptide
  MOD_RES (6)..(7): Xaa is C or S
AVPKAXXAPTKLNAISVLYF

SEQ ID NO: 1516 - protein, 18 aa, Artificial Sequence
  Non-cyclic GFR-binding peptide
  MOD_RES (4)..(5): Xaa is C or S
ASPXXVPQDLSAISILYL

SEQ ID NO: 1517 - protein, 15 aa, Artificial Sequence
  Non-cyclic GFR-binding peptide
  MOD_RES (1)..(2): Xaa is C or S
XXVPQALSAISILYL

SEQ ID NO: 1518 - protein, 18 aa, Artificial Sequence
  Non-cyclic GFR-binding peptide
  MOD_RES (4)..(5): Xaa is C or S
GKAXXVPTKLSAISVLYL

SEQ ID NO: 1519 - protein, 11 aa, Artificial Sequence
  Non-cyclic GFR-binding peptide
QDLSPISILYK

SEQ ID NO: 1520 - protein, 18 aa, Artificial Sequence
  Non-cyclic GFR-binding peptide
  MOD_RES (3)..(3): Xaa is C or S
VQXRPTQVQLSATSVLYY

SEQ ID NO: 1521 - protein, 9 aa, Artificial Sequence
  Non-cyclic GFR-binding peptide
LSATSMLYY

SEQ ID NO: 1522 - protein, 18 aa, Artificial Sequence
  Non-cyclic GFR-binding peptide
  MOD_RES (4)..(5): Xaa is C or S
PKAXXVPTELNAISMLYF

SEQ ID NO: 1523 - protein, 13 aa, Artificial Sequence
  Non-cyclic GFR-binding peptide
VPQALSATSILYY

SEQ ID NO: 1524 - protein, 15 aa, Artificial Sequence
  Non-cyclic GFR-binding peptide
  MOD_RES (2)..(2): Xaa is C or S
TXAPTKLSATSVLYY

SEQ ID NO: 1525 - protein, 11 aa, Artificial Sequence
  Non-cyclic GFR-binding peptide
TELSPISMLYK

SEQ ID NO: 1526 - protein, 17 aa, Artificial Sequence
  Non-cyclic GFR-binding peptide
  MOD_RES (2)..(2): Xaa is C or S
QXRPTQVQLSATSVLYY

SEQ ID NO: 1527 - protein, 17 aa, Artificial Sequence
  Non-cyclic GFR-binding peptide
  MOD_RES (3)..(4): Xaa is C or S
APXXVPQALSPISILYK

SEQ ID NO: 1528 - protein, 18 aa, Artificial Sequence
  Non-cyclic GFR-binding peptide
  MOD_RES (4)..(5): Xaa is C or S
GKAXXVPTKLNAISVLYF

SEQ ID NO: 1529 - protein, 20 aa, Artificial Sequence
  Non-cyclic GFR-binding peptide
  MOD_RES (6)..(7): Xaa is C or S
SIPKAXXVPTELSATSMLYY

SEQ ID NO: 1530 - protein, 15 aa, Artificial Sequence
  Non-cyclic GFR-binding peptide
  MOD_RES (1)..(2): Xaa is C or S
XXVPQALSATSILYY

SEQ ID NO: 1531 - protein, 17 aa, Artificial Sequence
  Non-cyclic GFR-binding peptide
  MOD_RES (3)..(4): Xaa is C or S
KAXXVPTELNAISMLYF

SEQ ID NO: 1532 - protein, 17 aa, Artificial Sequence
  Non-cyclic GFR-binding peptide
  MOD_RES (3)..(4): Xaa is C or S
APXXVPQALNAISILYF

SEQ ID NO: 1533 - protein, 18 aa, Artificial Sequence
  Non-cyclic GFR-binding peptide
  MOD_RES (4)..(5): Xaa is C or S
AAPXXVPQALSAISILYL

SEQ ID NO: 1534 - protein, 20 aa, Artificial Sequence
  Non-cyclic GFR-binding peptide
  MOD_RES (6)..(7): Xaa is C or S
TVPKPXXAPTQLSAISVLYL

SEQ ID NO: 1535 - protein, 19 aa, Artificial Sequence
  Non-cyclic GFR-binding peptide
  MOD_RES (5)..(6): Xaa is C or S
VPKPXXAPTQLSAISVLYL

SEQ ID NO: 1536 - protein, 11 aa, Artificial Sequence
  Non-cyclic GFR-binding peptide
TELNAISMLYF

SEQ ID NO: 1537 - protein, 17 aa, Artificial Sequence
  Non-cyclic GFR-binding peptide
  MOD_RES (3)..(4): Xaa is C or S
KAXXVPTELSPISMLYK

SEQ ID NO: 1538 - protein, 12 aa, Artificial Sequence
  Non-cyclic GFR-binding peptide
SQDLSATSILYY

SEQ ID NO: 1539 - protein, 14 aa, Artificial Sequence
  Non-cyclic GFR-binding peptide
  MOD_RES (1)..(1): Xaa is C or S
XVPQALSAISILYL

SEQ ID NO: 1540 - protein, 20 aa, Artificial Sequence
  Non-cyclic GFR-binding peptide
  MOD_RES (7)..(7): Xaa is C or S
HVTKPTXAPTKLSAISVLYL

SEQ ID NO: 1541 - protein, 20 aa, Artificial Sequence
  Non-cyclic GFR-binding peptide
  MOD_RES (6)..(7): Xaa is C or S
TVPKPXXAPTQLSPISVLYK

SEQ ID NO: 1542 - protein, 18 aa, Artificial Sequence
  Non-cyclic GFR-binding peptide
  MOD_RES (4)..(5): Xaa is C or S
ASPXXVPQDLSPISILYK

SEQ ID NO: 1543 - protein, 13 aa, Artificial Sequence
  Non-cyclic GFR-binding peptide
APTKLSAISVLYL

SEQ ID NO: 1544 - protein, 19 aa, Artificial Sequence
  Non-cyclic GFR-binding peptide
  MOD_RES (5)..(6): Xaa is C or S
SAAPXXVPQALSATSILYY

SEQ ID NO: 1545 - protein, 17 aa, Artificial Sequence
  Non-cyclic GFR-binding peptide
  MOD_RES (3)..(4): Xaa is C or S
KAXXAPTKLNAISVLYF

SEQ ID NO: 1546 - protein, 17 aa, Artificial Sequence
  Non-cyclic GFR-binding peptide
  MOD_RES (3)..(4): Xaa is C or S
SPXXVPQDLSPISILYK

SEQ ID NO: 1547 - protein, 19 aa, Artificial Sequence
  Non-cyclic GFR-binding peptide
  MOD_RES (5)..(6): Xaa is C or S
SASPXXVPQDLSATSILYY

SEQ ID NO: 1548 - protein, 16 aa, Artificial Sequence
  Non-cyclic GFR-binding peptide
  MOD_RES (1)..(1): Xaa is C or S
XRPTQVQLSAISVLYL

SEQ ID NO: 1549 - protein, 19 aa, Artificial Sequence
  Non-cyclic GFR-binding peptide
  MOD_RES (5)..(6): Xaa is C or S
VPKAXXAPTKLSAISVLYL

SEQ ID NO: 1550 - protein, 20 aa, Artificial Sequence
  Non-cyclic GFR-binding peptide
  MOD_RES (6)..(7): Xaa is C or S
AVPKAXXAPTKLSPISVLYK

SEQ ID NO: 1551 - protein, 16 aa, Artificial Sequence
  Non-cyclic GFR-binding peptide
  MOD_RES (2)..(3): Xaa is C or S
PXXVPQALSPISILYK

SEQ ID NO: 1552 - protein, 20 aa, Artificial Sequence
  Non-cyclic GFR-binding peptide
  MOD_RES (5)..(5): Xaa is C or S
RNVQXRPTQVQLNAISVLYF

SEQ ID NO: 1553 - protein, 16 aa, Artificial Sequence
  Non-cyclic GFR-binding peptide
  MOD_RES (2)..(3): Xaa is C or S
PXXAPTKLSATSVLYY

SEQ ID NO: 1554 - protein, 19 aa, Artificial Sequence
  Non-cyclic GFR-binding peptide
  MOD_RES (5)..(6): Xaa is C or S
SASPXXVPQDLSAISILYL

SEQ ID NO: 1555 - protein, 17 aa, Artificial Sequence
  Non-cyclic GFR-binding peptide
  MOD_RES (3)..(4): Xaa is C or S
KAXXVPTKLNAISVLYF

SEQ ID NO: 1556 - protein, 15 aa, Artificial Sequence
  Non-cyclic GFR-binding peptide
RPTQVQLNAISVLYF

SEQ ID NO: 1557 - protein, 19 aa, Artificial Sequence
  Non-cyclic GFR-binding peptide
  MOD_RES (5)..(6): Xaa is C or S
SASPXXVSQDLSPISILYK

SEQ ID NO: 1558 - protein, 17 aa, Artificial Sequence
  Non-cyclic GFR-binding peptide
  MOD_RES (4)..(4): Xaa is C or S
KPTXAPTKLSAISVLYL

SEQ ID NO: 1559 - protein, 15 aa, Artificial Sequence
  Non-cyclic GFR-binding peptide
  MOD_RES (1)..(2): Xaa is C or S
XXVPQDLNAISILYF

SEQ ID NO: 1560 - protein, 14 aa, Artificial Sequence
  Non-cyclic GFR-binding peptide
  MOD_RES (1)..(1): Xaa is C or S
XVPTELSPISMLYK

SEQ ID NO: 1561 - protein, 17 aa, Artificial Sequence
  Non-cyclic GFR-binding peptide
  MOD_RES (3)..(4): Xaa is C or S
SPXXVSQDLSATSILYY

SEQ ID NO: 1562 - protein, 11 aa, Artificial Sequence
  Non-cyclic GFR-binding peptide
TKLSAISVLYL

SEQ ID NO: 1563 - protein, 11 aa, Artificial Sequence
  Non-cyclic GFR-binding peptide
QALSATSILYY

SEQ ID NO: 1564 - protein, 11 aa, Artificial Sequence
  Non-cyclic GFR-binding peptide
QDLSATSILYY

SEQ ID NO: 1565 - protein, 12 aa, Artificial Sequence
  Non-cyclic GFR-binding peptide
PTELSATSMLYY

SEQ ID NO: 1566 - protein, 20 aa, Artificial Sequence
  Non-cyclic GFR-binding peptide
  MOD_RES (6)..(7): Xaa is C or S
KIPKAXXVPTELNAISMLYF

SEQ ID NO: 1567 - protein, 18 aa, Artificial Sequence
  Non-cyclic GFR-binding peptide
  MOD_RES (3)..(3): Xaa is C or S
VQXRPTQVQLNAISVLYF

SEQ ID NO: 1568 - protein, 17 aa, Artificial Sequence
  Non-cyclic GFR-binding peptide
  MOD_RES (3)..(4): Xaa is C or S
KPXXAPTKLSAISVLYL

SEQ ID NO: 1569 - protein, 12 aa, Artificial Sequence
  Non-cyclic GFR-binding peptide
SQDLNAISILYF

SEQ ID NO: 1570 - protein, 18 aa, Artificial Sequence
  Non-cyclic GFR-binding peptide
  MOD_RES (4)..(5): Xaa is C or S
PKAXXAPTKLSAISVLYL

SEQ ID NO: 1571 - protein, 11 aa, Artificial Sequence
  Non-cyclic GFR-binding peptide
VQLNAISVLYF

SEQ ID NO: 1572 - protein, 10 aa, Artificial Sequence
  Non-cyclic GFR-binding peptide
ALNAISILYF

SEQ ID NO: 1573 - protein, 15 aa, Artificial Sequence
  Non-cyclic GFR-binding peptide
  MOD_RES (1)..(2): Xaa is C or S
XXVPQALNAISILYF

SEQ ID NO: 1574 - protein, 13 aa, Artificial Sequence
  Non-cyclic GFR-binding peptide
VPQDLSAISILYL

SEQ ID NO: 1575 - protein, 13 aa, Artificial Sequence
  Non-cyclic GFR-binding peptide
VPQALNAISILYF

SEQ ID NO: 1576 - protein, 12 aa, Artificial Sequence
  Non-cyclic GFR-binding peptide
PTELSPISMLYK

SEQ ID NO: 1577 - protein, 14 aa, Artificial Sequence
  Non-cyclic GFR-binding peptide
  MOD_RES (1)..(1): Xaa is C or S
XVPTELSATSMLYY

SEQ ID NO: 1578 - protein, 14 aa, Artificial Sequence
  Non-cyclic GFR-binding peptide
  MOD_RES (1)..(1): Xaa is C or S
XVPQDLSAISILYL

SEQ ID NO: 1579 - protein, 9 aa, Artificial Sequence
  Non-cyclic GFR-binding peptide
LSPISMLYK

SEQ ID NO: 1580 - protein, 15 aa, Artificial Sequence
  Non-cyclic GFR-binding peptide
  MOD_RES (2)..(2): Xaa is C or S
TXAPTKLSPISVLYK

SEQ ID NO: 1581 - protein, 18 aa, Artificial Sequence
  Non-cyclic GFR-binding peptide
  MOD_RES (4)..(5): Xaa is C or S
PKPXXAPTKLSAISVLYL

SEQ ID NO: 1582 - protein, 16 aa, Artificial Sequence
  Non-cyclic GFR-binding peptide
  MOD_RES (2)..(3): Xaa is C or S
PXXVPQDLSATSILYY

SEQ ID NO: 1583 - protein, 14 aa, Artificial Sequence
  Non-cyclic GFR-binding peptide
  MOD_RES (1)..(1): Xaa is C or S
XVSQDLNAISILYF

SEQ ID NO: 1584 - protein, 18 aa, Artificial Sequence
  Non-cyclic GFR-binding peptide
  MOD_RES (4)..(5): Xaa is C or S
GKAXXVPTKLSATSVLYY

SEQ ID NO: 1585 - protein, 15 aa, Artificial Sequence
  Non-cyclic GFR-binding peptide
  MOD_RES (1)..(2): Xaa is C or S
XXVPTELSPISMLYK

SEQ ID NO: 1586 - protein, 16 aa, Artificial Sequence
  Non-cyclic GFR-binding peptide
  MOD_RES (2)..(3): Xaa is C or S
PXXVSQDLSATSILYY

SEQ ID NO: 1587 - protein, 14 aa, Artificial Sequence
  Non-cyclic GFR-binding peptide
  MOD_RES (1)..(1): Xaa is C or S
XVPQDLNAISILYF

SEQ ID NO: 1588 - protein, 13 aa, Artificial Sequence
  Non-cyclic GFR-binding peptide
VPQDLNAISILYF

SEQ ID NO: 1589 - protein, 20 aa, Artificial Sequence
  Non-cyclic GFR-binding peptide
  MOD_RES (6)..(7): Xaa is C or S
ASASPXXVPQDLSPISILYK

SEQ ID NO: 1590 - protein, 15 aa, Artificial Sequence
  Non-cyclic GFR-binding peptide
  MOD_RES (1)..(2): Xaa is C or S
XXVSQDLSATSILYY

SEQ ID NO: 1591 - protein, 15 aa, Artificial Sequence
  Non-cyclic GFR-binding peptide
  MOD_RES (1)..(2): Xaa is C or S
XXAPTKLSAISVLYL

SEQ ID NO: 1592 - protein, 19 aa, Artificial Sequence
  Non-cyclic GFR-binding peptide
  MOD_RES (5)..(6): Xaa is C or S
VGKAXXVPTKLNAISVLYF

SEQ ID NO: 1593 - protein, 16 aa, Artificial Sequence
  Non-cyclic GFR-binding peptide
  MOD_RES (2)..(3): Xaa is C or S
AXXVPTKLNAISVLYF

SEQ ID NO: 1594 - protein, 9 aa, Artificial Sequence
  Non-cyclic GFR-binding peptide
LSAISILYL

SEQ ID NO: 1595 - protein, 16 aa, Artificial Sequence
  Non-cyclic GFR-binding peptide
  MOD_RES (2)..(3): Xaa is C or S
PXXVSQDLSPISILYK

SEQ ID NO: 1596 - protein, 10 aa, Artificial Sequence
  Non-cyclic GFR-binding peptide
DLNAISILYF

SEQ ID NO: 1597 - protein, 15 aa, Artificial Sequence
  Non-cyclic GFR-binding peptide
  MOD_RES (1)..(2): Xaa is C or S
XXAPTQLSAISVLYL

SEQ ID NO: 1598 - protein, 18 aa, Artificial Sequence
  Non-cyclic GFR-binding peptide
  MOD_RES (4)..(5): Xaa is C or S
PKPXXAPTQLSAISVLYL

SEQ ID NO: 1599 - protein, 20 aa, Artificial Sequence
  Non-cyclic GFR-binding peptide
  MOD_RES (6)..(7): Xaa is C or S
ASAAPXXVPQALNAISILYF

SEQ ID NO: 1600 - protein, 19 aa, Artificial Sequence
  Non-cyclic GFR-binding peptide
  MOD_RES (6)..(6): Xaa is C or S
VTKPTXAPTKLSAISVLYL

SEQ ID NO: 1601 - protein, 13 aa, Artificial Sequence
  Non-cyclic GFR-binding peptide
TQVQLSAISVLYL

SEQ ID NO: 1602 - protein, 20 aa, Artificial Sequence
  Non-cyclic GFR-binding peptide
  MOD_RES (6)..(7): Xaa is C or S
ASAAPXXVPQALSAISILYL

SEQ ID NO: 1603 - protein, 13 aa, Artificial Sequence
  Non-cyclic GFR-binding peptide
TQVQLNAISVLYF

SEQ ID NO: 1604 - protein, 18 aa, Artificial Sequence
  Non-cyclic GFR-binding peptide
  MOD_RES (4)..(5): Xaa is C or S
ASPXXVSQDLNAISILYF

SEQ ID NO: 1605 - protein, 12 aa, Artificial Sequence
  Non-cyclic GFR-binding peptide
PQALSAISILYL

SEQ ID NO: 1606 - protein, 20 aa, Artificial Sequence
  Non-cyclic GFR-binding peptide
  MOD_RES (6)..(7): Xaa is C or S
YVPKPXXAPTKLSATSVLYY

SEQ ID NO: 1607 - protein, 16 aa, Artificial Sequence
  Non-cyclic GFR-binding peptide
  MOD_RES (2)..(3): Xaa is C or S
AXXVPTKLSAISVLYL

SEQ ID NO: 1608 - protein, 12 aa, Artificial Sequence
  Non-cyclic GFR-binding peptide
PQALNAISILYF

SEQ ID NO: 1609 - protein, 12 aa, Artificial Sequence
  Non-cyclic GFR-binding peptide
PQDLSAISILYL

SEQ ID NO: 1610 - protein, 19 aa, Artificial Sequence
  Non-cyclic GFR-binding peptide
  MOD_RES (4)..(4): Xaa is C or S
NVQXRPTQVQLNAISVLYF

SEQ ID NO: 1611 - protein, 12 aa, Artificial Sequence
  Non-cyclic GFR-binding peptide
PTQLSATSVLYY

SEQ ID NO: 1612 - protein, 10 aa, Artificial Sequence
  Non-cyclic GFR-binding peptide
ELSATSMLYY

SEQ ID NO: 1613 - protein, 18 aa, Artificial Sequence
  Non-cyclic GFR-binding peptide
  MOD_RES (5)..(5): Xaa is C or S
TKPTXAPTKLSAISVLYL

SEQ ID NO: 1614 - protein, 19 aa, Artificial Sequence
  Non-cyclic GFR-binding peptide
  MOD_RES (5)..(6): Xaa is C or S
IPKAXXVPTELSATSMLYY

SEQ ID NO: 1615 - protein, 20 aa, Artificial Sequence
  Non-cyclic GFR-binding peptide
  MOD_RES (5)..(5): Xaa is C or S
RNVQXRPTQVQLSAISVLYL

SEQ ID NO: 1616 - protein, 15 aa, Artificial Sequence
  Non-cyclic GFR-binding peptide
RPTQVQLSAISVLYL

SEQ ID NO: 1617 - protein, 17 aa, Artificial Sequence
  Non-cyclic GFR-binding peptide
  MOD_RES (3)..(4): Xaa is C or S
KPXXAPTQLSAISVLYL

SEQ ID NO: 1618 - protein, 18 aa, Artificial Sequence
  Non-cyclic GFR-binding peptide
  MOD_RES (4)..(5): Xaa is C or S
ASPXXVSQDLSAISILYL

SEQ ID NO: 1619 - protein, 9 aa, Artificial Sequence
  Non-cyclic GFR-binding peptide
LNAISILYF

SEQ ID NO: 1620 - protein, 17 aa, Artificial Sequence
  Non-cyclic GFR-binding peptide
  MOD_RES (3)..(4): Xaa is C or S
KAXXVPTKLSATSVLYY

SEQ ID NO: 1621 - protein, 17 aa, Artificial Sequence
  Non-cyclic GFR-binding peptide
  MOD_RES (3)..(4): Xaa is C or S
SPXXVSQDLSPISILYK

SEQ ID NO: 1622 - protein, 14 aa, Artificial Sequence
  Non-cyclic GFR-binding peptide
  MOD_RES (1)..(1): Xaa is C or S
XVPQALNAISILYF

SEQ ID NO: 1623 - protein, 17 aa, Artificial Sequence
  Non-cyclic GFR-binding peptide
  MOD_RES (3)..(4): Xaa is C or S
KAXXAPTKLSAISVLYL

SEQ ID NO: 1624 - protein, 10 aa, Artificial Sequence
  Non-cyclic GFR-binding peptide
QLSAISVLYL

SEQ ID NO: 1625 - protein, 15 aa, Artificial Sequence
  Non-cyclic GFR-binding peptide
  MOD_RES (1)..(2): Xaa is C or S
XXAPTKLSPISVLYK

SEQ ID NO: 1626 - protein, 11 aa, Artificial Sequence
  Non-cyclic GFR-binding peptide
VQLSAISVLYL

SEQ ID NO: 1627 - protein, 12 aa, Artificial Sequence
  Non-cyclic GFR-binding peptide
QVQLSAISVLYL

SEQ ID NO: 1628 - protein, 16 aa, Artificial Sequence
  Non-cyclic GFR-binding peptide
  MOD_RES (2)..(3): Xaa is C or S
PXXAPTKLSPISVLYK

SEQ ID NO: 1629 - protein, 19 aa, Artificial Sequence
  Non-cyclic GFR-binding peptide
  MOD_RES (5)..(6): Xaa is C or S
SAAPXXVPQALSPISILYK

SEQ ID NO: 1630 - protein, 19 aa, Artificial Sequence
  Non-cyclic GFR-binding peptide
  MOD_RES (5)..(6): Xaa is C or S
SAAPXXVPQALNAISILYF

SEQ ID NO: 1631 - protein, 19 aa, Artificial Sequence
  Non-cyclic GFR-binding peptide
  MOD_RES (5)..(6): Xaa is C or S
IPKAXXVPTELSPISMLYK

SEQ ID NO: 1632 - protein, 13 aa, Artificial Sequence
  Non-cyclic GFR-binding peptide
VPQDLSPISILYK

SEQ ID NO: 1633 - protein, 10 aa, Artificial Sequence
  Non-cyclic GFR-binding peptide
QLSATSVLYY

SEQ ID NO: 1634 - protein, 19 aa, Artificial Sequence
  Non-cyclic GFR-binding peptide
  MOD_RES (4)..(4): Xaa is C or S
NVQXRPTQVQLSATSVLYY

SEQ ID NO: 1635 - protein, 14 aa, Artificial Sequence
  Non-cyclic GFR-binding peptide
  MOD_RES (1)..(1): Xaa is C or S
XAPTQLSPISVLYK

SEQ ID NO: 1636 - protein, 12 aa, Artificial Sequence
  Non-cyclic GFR-binding peptide
PTELNAISMLYF

SEQ ID NO: 1637 - protein, 12 aa, Artificial Sequence
  Non-cyclic GFR-binding peptide
QVQLSATSVLYY

SEQ ID NO: 1638 - protein, 17 aa, Artificial Sequence
  Non-cyclic GFR-binding peptide
  MOD_RES (3)..(4): Xaa is C or S
SPXXVPQDLSATSILYY

SEQ ID NO: 1639 - protein, 16 aa, Artificial Sequence
  Non-cyclic GFR-binding peptide
  MOD_RES (2)..(3): Xaa is C or S
AXXVPTELSPISMLYK

SEQ ID NO: 1640 - protein, 19 aa, Artificial Sequence
  Non-cyclic GFR-binding peptide
  MOD_RES (4)..(4): Xaa is C or S
NVQXRPTQVQLSAISVLYL

SEQ ID NO: 1641 - protein, 15 aa, Artificial Sequence
  Non-cyclic GFR-binding peptide
RPTQVQLSATSVLYY

SEQ ID NO: 1642 - protein, 14 aa, Artificial Sequence
  Non-cyclic GFR-binding peptide
PTQVQLSATSVLYY

SEQ ID NO: 1643 - protein, 9 aa, Artificial Sequence
  Non-cyclic GFR-binding peptide
LSATSILYY

SEQ ID NO: 1644 - protein, 17 aa, Artificial Sequence
  Non-cyclic GFR-binding peptide
  MOD_RES (3)..(4): Xaa is C or S
KAXXVPTELSATSMLYY

SEQ ID NO: 1645 - protein, 18 aa, Artificial Sequence
  Non-cyclic GFR-binding peptide
  MOD_RES (5)..(5): Xaa is C or S
TKPTXAPTKLSATSVLYY

SEQ ID NO: 1646 - protein, 13 aa, Artificial Sequence
  Non-cyclic GFR-binding peptide
VPTELSPISMLYK

SEQ ID NO: 1647 - protein, 16 aa, Artificial Sequence
  Non-cyclic GFR-binding peptide
  MOD_RES (1)..(1): Xaa is C or S
XRPTQVQLSPISVLYK

SEQ ID NO: 1648 - protein, 13 aa, Artificial Sequence
  Non-cyclic GFR-binding peptide
VPTKLNAISVLYF

SEQ ID NO: 1649 - protein, 14 aa, Artificial Sequence
  Non-cyclic GFR-binding peptide
  MOD_RES (1)..(1): Xaa is C or S
XVSQDLSPISILYK

SEQ ID NO: 1650 - protein, 19 aa, Artificial Sequence
  Non-cyclic GFR-binding peptide
  MOD_RES (5)..(6): Xaa is C or S
VPKAXXAPTKLNAISVLYF

SEQ ID NO: 1651 - protein, 12 aa, Artificial Sequence
  Non-cyclic GFR-binding peptide
PQDLNAISILYF

SEQ ID NO: 1652 - protein, 14 aa, Artificial Sequence
  Non-cyclic GFR-binding peptide
  MOD_RES (1)..(1): Xaa is C or S
XAPTKLSAISVLYL

SEQ ID NO: 1653 - protein, 16 aa, Artificial Sequence
  Non-cyclic GFR-binding peptide
  MOD_RES (1)..(1): Xaa is C or S
XRPTQVQLNAISVLYF

SEQ ID NO: 1654 - protein, 17 aa, Artificial Sequence
  Non-cyclic GFR-binding peptide
  MOD_RES (3)..(4): Xaa is C or S
SPXXVPQDLSAISILYL

SEQ ID NO: 1655 - protein, 19 aa, Artificial Sequence
  Non-cyclic GFR-binding peptide
  MOD_RES (5)..(6): Xaa is C or S
VPKPXXAPTKLSAISVLYL

SEQ ID NO: 1656 - protein, 19 aa, Artificial Sequence
  Non-cyclic GFR-binding peptide
  MOD_RES (5)..(6): Xaa is C or S
IPKAXXVPTELNAISMLYF

SEQ ID NO: 1657 - protein, 14 aa, Artificial Sequence
  Non-cyclic GFR-binding peptide
  MOD_RES (1)..(1): Xaa is C or S
XVPTKLSATSVLYY

SEQ ID NO: 1658 - protein, 20 aa, Artificial Sequence
  Non-cyclic GFR-binding peptide
  MOD_RES (6)..(7): Xaa is C or S
SIPKAXXVPTELSPISMLYK

SEQ ID NO: 1659 - protein, 19 aa, Artificial Sequence
  Non-cyclic GFR-binding peptide
  MOD_RES (5)..(6): Xaa is C or S
SASPXXVPQDLNAISILYF

SEQ ID NO: 1660 - protein, 19 aa, Artificial Sequence
  Non-cyclic GFR-binding peptide
  MOD_RES (5)..(6): Xaa is C or S
VGKAXXVPTKLSAISVLYL

SEQ ID NO: 1661 - protein, 20 aa, Artificial Sequence
  Non-cyclic GFR-binding peptide
  MOD_RES (6)..(7): Xaa is C or S
SIPKAXXVPTELNAISMLYF

SEQ ID NO: 1662 - protein, 19 aa, Artificial Sequence
  Non-cyclic GFR-binding peptide
  MOD_RES (5)..(6): Xaa is C or S
VPKAXXAPTKLSPISVLYK

SEQ ID NO: 1663 - protein, 16 aa, Artificial Sequence
  Non-cyclic GFR-binding peptide
  MOD_RES (2)..(3): Xaa is C or S
AXXVPTELNAISMLYF

SEQ ID NO: 1664 - protein, 17 aa, Artificial Sequence
  Non-cyclic GFR-binding peptide
  MOD_RES (3)..(4): Xaa is C or S
APXXVPQALSATSILYY

SEQ ID NO: 1665 - protein, 15 aa, Artificial Sequence
  Non-cyclic GFR-binding peptide
  MOD_RES (1)..(2): Xaa is C or S
XXVPQDLSAISILYL

SEQ ID NO: 1666 - protein, 10 aa, Artificial Sequence
  Non-cyclic GFR-binding peptide
DLSAISILYL

SEQ ID NO: 1667 - protein, 17 aa, Artificial Sequence
  Non-cyclic GFR-binding peptide
  MOD_RES (3)..(4): Xaa is C or S
KAXXVPTKLSAISVLYL

SEQ ID NO: 1668 - protein, 19 aa, Artificial Sequence
  Non-cyclic GFR-binding peptide
  MOD_RES (5)..(6): Xaa is C or S
SASPXXVPQDLSPISILYK

SEQ ID NO: 1669 - protein, 9 aa, Artificial Sequence
  Non-cyclic GFR-binding peptide
LNAISMLYF

SEQ ID NO: 1670 - protein, 20 aa, Artificial Sequence
  Non-cyclic GFR-binding peptide
  MOD_RES (6)..(7): Xaa is C or S
AVPKAXXAPTKLSAISVLYL

SEQ ID NO: 1671 - protein, 20 aa, Artificial Sequence
  Non-cyclic GFR-binding peptide
  MOD_RES (6)..(7): Xaa is C or S
YVPKPXXAPTKLSPISVLYK

SEQ ID NO: 1672 - protein, 10 aa, Artificial Sequence
  Non-cyclic GFR-binding peptide
DLSATSILYY

SEQ ID NO: 1673 - protein, 16 aa, Artificial Sequence
  Non-cyclic GFR-binding peptide
  MOD_RES (2)..(3): Xaa is C or S
AXXAPTKLNAISVLYF

SEQ ID NO: 1674 - protein, 16 aa, Artificial Sequence
  Non-cyclic GFR-binding peptide
  MOD_RES (3)..(3): Xaa is C or S
PTXAPTKLSATSVLYY

SEQ ID NO: 1675 - protein, 11 aa, Artificial Sequence
  Non-cyclic GFR-binding peptide
TQLSATSVLYY

SEQ ID NO: 1676 - protein, 17 aa, Artificial Sequence
  Non-cyclic GFR-binding peptide
  MOD_RES (3)..(4): Xaa is C or S
APXXVPQALSAISILYL

SEQ ID NO: 1677 - protein, 15 aa, Artificial Sequence
  Non-cyclic GFR-binding peptide
  MOD_RES (1)..(2): Xaa is C or S
XXVPTKLSAISVLYL

SEQ ID NO: 1678 - protein, 16 aa, Artificial Sequence
  Non-cyclic GFR-binding peptide
  MOD_RES (3)..(3): Xaa is C or S
PTXAPTKLSAISVLYL

SEQ ID NO: 1679 - protein, 14 aa, Artificial Sequence
  Non-cyclic GFR-binding peptide
  MOD_RES (1)..(1): Xaa is C or S
XVSQDLSAISILYL

SEQ ID NO: 1680 - protein, 15 aa, Artificial Sequence
  Non-cyclic GFR-binding peptide
  MOD_RES (1)..(2): Xaa is C or S
XXVPTKLNAISVLYF

SEQ ID NO: 1681 - protein, 19 aa, Artificial Sequence
  Non-cyclic GFR-binding peptide
  MOD_RES (5)..(6): Xaa is C or S
VGKAXXVPTKLSATSVLYY

SEQ ID NO: 1682 - protein, 9 aa, Artificial Sequence
  Non-cyclic GFR-binding peptide
LSAISVLYL

SEQ ID NO: 1683 - protein, 11 aa, Artificial Sequence
  Non-cyclic GFR-binding peptide
VQLSPISVLYK

SEQ ID NO: 1684 - protein, 11 aa, Artificial Sequence
  Non-cyclic GFR-binding peptide
QALSAISILYL

SEQ ID NO: 1685 - protein, 11 aa, Artificial Sequence
  Non-cyclic GFR-binding peptide
TQLSPISVLYK

SEQ ID NO: 1686 - protein, 16 aa, Artificial Sequence
  Non-cyclic GFR-binding peptide
  MOD_RES (2)..(3): Xaa is C or S
PXXVPQDLSAISILYL

SEQ ID NO: 1687 - protein, 20 aa, Artificial Sequence
  Non-cyclic GFR-binding peptide
  MOD_RES (6)..(7): Xaa is C or S
ASASPXXVPQDLSATSILYY

SEQ ID NO: 1688 - protein, 17 aa, Artificial Sequence
  Non-cyclic GFR-binding peptide
  MOD_RES (3)..(4): Xaa is C or S
KPXXAPTKLSATSVLYY

SEQ ID NO: 1689 - protein, 15 aa, Artificial Sequence
  Non-cyclic GFR-binding peptide
  MOD_RES (1)..(2): Xaa is C or S
XXVPTKLSATSVLYY

SEQ ID NO: 1690 - protein, 19 aa, Artificial Sequence
  Non-cyclic GFR-binding peptide
  MOD_RES (5)..(6): Xaa is C or S
VPKPXXAPTQLSPISVLYK

SEQ ID NO: 1691 - protein, 20 aa, Artificial Sequence
  Non-cyclic GFR-binding peptide
  MOD_RES (6)..(7): Xaa is C or S
KVGKAXXVPTKLSAISVLYL

SEQ ID NO: 1692 - protein, 20 aa, Artificial Sequence
  Non-cyclic GFR-binding peptide
  MOD_RES (6)..(7): Xaa is C or S
ASASPXXVSQDLSAISILYL

SEQ ID NO: 1693 - protein, 18 aa, Artificial Sequence
  Non-cyclic GFR-binding peptide
  MOD_RES (4)..(5): Xaa is C or S
AAPXXVPQALNAISILYF

SEQ ID NO: 1694 - protein, 16 aa, Artificial Sequence
  Non-cyclic GFR-binding peptide
  MOD_RES (2)..(3): Xaa is C or S
AXXAPTKLSPISVLYK

SEQ ID NO: 1695 - protein, 16 aa, Artificial Sequence
  Non-cyclic GFR-binding peptide
  MOD_RES (3)..(3): Xaa is C or S
PTXAPTKLSPISVLYK

SEQ ID NO: 1696 - protein, 15 aa, Artificial Sequence
  Non-cyclic GFR-binding peptide
  MOD_RES (1)..(2): Xaa is C or S
XXVSQDLNAISILYF

SEQ ID NO: 1697 - protein, 19 aa, Artificial Sequence
  Non-cyclic GFR-binding peptide
  MOD_RES (5)..(6): Xaa is C or S
VPKPXXAPTKLSPISVLYK

SEQ ID NO: 1698 - protein, 15 aa, Artificial Sequence
  Non-cyclic GFR-binding peptide
  MOD_RES (1)..(2): Xaa is C or S
XXVPQDLSATSILYY

SEQ ID NO: 1699 - protein, 16 aa, Artificial Sequence
  Non-cyclic GFR-binding peptide
  MOD_RES (2)..(3): Xaa is C or S
PXXAPTKLSAISVLYL

SEQ ID NO: 1700 - protein, 13 aa, Artificial Sequence
  Non-cyclic GFR-binding peptide
VPTKLSAISVLYL

SEQ ID NO: 1701 - protein, 13 aa, Artificial Sequence
  Non-cyclic GFR-binding peptide
VPQDLSATSILYY

SEQ ID NO: 1702 - protein, 12 aa, Artificial Sequence
  Non-cyclic GFR-binding peptide
QVQLSPISVLYK

SEQ ID NO: 1703 - protein, 20 aa, Artificial Sequence
  Non-cyclic GFR-binding peptide
  MOD_RES (6)..(7): Xaa is C or S
KVGKAXXVPTKLSATSVLYY

SEQ ID NO: 1704 - protein, 11 aa, Artificial Sequence
  Non-cyclic GFR-binding peptide
QALNAISILYF

SEQ ID NO: 1705 - protein, 20 aa, Artificial Sequence
  Non-cyclic GFR-binding peptide
  MOD_RES (6)..(7): Xaa is C or S
ASASPXXVSQDLNAISILYF

SEQ ID NO: 1706 - protein, 14 aa, Artificial Sequence
  Non-cyclic GFR-binding peptide
PTQVQLSAISVLYL

SEQ ID NO: 1707 - protein, 10 aa, Artificial Sequence
  Non-cyclic GFR-binding peptide
QLSPISVLYK

SEQ ID NO: 1708 - protein, 11 aa, Artificial Sequence
  Non-cyclic GFR-binding peptide
TQLSAISVLYL

SEQ ID NO: 1709 - protein, 14 aa, Artificial Sequence
  Non-cyclic GFR-binding peptide
  MOD_RES (1)..(1): Xaa is C or S
XAPTQLSAISVLYL

SEQ ID NO: 1710 - protein, 13 aa, Artificial Sequence
  Non-cyclic GFR-binding peptide
VSQDLNAISILYF

SEQ ID NO: 1711 - protein, 11 aa, Artificial Sequence
  Non-cyclic GFR-binding peptide
QDLSAISILYL

SEQ ID NO: 1712 - protein, 16 aa, Artificial Sequence
  Non-cyclic GFR-binding peptide
  MOD_RES (2)..(3): Xaa is C or S
PXXVPQDLSPISILYK

SEQ ID NO: 1713 - protein, 15 aa, Artificial Sequence
  Non-cyclic GFR-binding peptide
  MOD_RES (1)..(2): Xaa is C or S
XXVSQDLSPISILYK

SEQ ID NO: 1714 - protein, 18 aa, Artificial Sequence
  Non-cyclic GFR-binding peptide
  MOD_RES (4)..(5): Xaa is C or S
ASPXXVPQDLNAISILYF

SEQ ID NO: 1715 - protein, 11 aa, Artificial Sequence
  Non-cyclic GFR-binding peptide
QALSPISILYK

SEQ ID NO: 1716 - protein, 20 aa, Artificial Sequence
  Non-cyclic GFR-binding peptide
  MOD_RES (6)..(7): Xaa is C or S
ASASPXXVSQDLSPISILYK

SEQ ID NO: 1717 - protein, 15 aa, Artificial Sequence
  Non-cyclic GFR-binding peptide
  MOD_RES (1)..(2): Xaa is C or S
XXVPTELSATSMLYY

SEQ ID NO: 1718 - protein, 17 aa, Artificial Sequence
  Non-cyclic GFR-binding peptide
  MOD_RES (4)..(4): Xaa is C or S
KPTXAPTKLSPISVLYK

SEQ ID NO: 1719 - protein, 14 aa, Artificial Sequence
  Non-cyclic GFR-binding peptide
  MOD_RES (1)..(1): Xaa is C or S
XVSQDLSATSILYY

SEQ ID NO: 1720 - protein, 16 aa, Artificial Sequence
  Non-cyclic GFR-binding peptide
  MOD_RES (2)..(3): Xaa is C or S
PXXVPQDLNAISILYF

SEQ ID NO: 1721 - protein, 13 aa, Artificial Sequence
  Non-cyclic GFR-binding peptide
VSQDLSPISILYK

SEQ ID NO: 1722 - protein, 13 aa, Artificial Sequence
  Non-cyclic GFR-binding peptide
VPTELSATSMLYY

SEQ ID NO: 1723 - protein, 14 aa, Artificial Sequence
  Non-cyclic GFR-binding peptide
  MOD_RES (1)..(1): Xaa is C or S
XAPTQLSATSVLYY

SEQ ID NO: 1724 - protein, 9 aa, Artificial Sequence
  Non-cyclic GFR-binding peptide
LSPISILYK

SEQ ID NO: 1725 - protein, 16 aa, Artificial Sequence
  Non-cyclic GFR-binding peptide
  MOD_RES (1)..(1): Xaa is C or S
XRPTQVQLSATSVLYY

SEQ ID NO: 1726 - protein, 15 aa, Artificial Sequence
  Non-cyclic GFR-binding peptide
  MOD_RES (1)..(2): Xaa is C or S
XXVPQALSPISILYK

SEQ ID NO: 1727 - protein, 16 aa, Artificial Sequence
  Non-cyclic GFR-binding peptide
  MOD_RES (2)..(3): Xaa is C or S
PXXAPTQLSPISVLYK

SEQ ID NO: 1728 - protein, 12 aa, Artificial Sequence
  Non-cyclic GFR-binding peptide
QVQLNAISVLYF

SEQ ID NO: 1729 - protein, 16 aa, Artificial Sequence
  Non-cyclic GFR-binding peptide
  MOD_RES (2)..(3): Xaa is C or S
AXXVPTELSATSMLYY

SEQ ID NO: 1730 - protein, 19 aa, Artificial Sequence
  Non-cyclic GFR-binding peptide
  MOD_RES (5)..(6): Xaa is C or S
SASPXXVSQDLNAISILYF

SEQ ID NO: 1731 - protein, 17 aa, Artificial Sequence
  Non-cyclic GFR-binding peptide
  MOD_RES (4)..(4): Xaa is C or S
KPTXAPTKLSATSVLYY

SEQ ID NO: 1732 - protein, 18 aa, Artificial Sequence
  Non-cyclic GFR-binding peptide
  MOD_RES (4)..(5): Xaa is C or S
AAPXXVPQALSPISILYK

SEQ ID NO: 1733 - protein, 20 aa, Artificial Sequence
  Non-cyclic GFR-binding peptide
  MOD_RES (7)..(7): Xaa is C or S
HVTKPTXAPTKLSATSVLYY

SEQ ID NO: 1734 - protein, 14 aa, Artificial Sequence
  Non-cyclic GFR-binding peptide
PTQVQLSPISVLYK

SEQ ID NO: 1735 - protein, 13 aa, Artificial Sequence
  Non-cyclic GFR-binding peptide
VPTKLSATSVLYY

SEQ ID NO: 1736 - protein, 20 aa, Artificial Sequence
  Non-cyclic GFR-binding peptide
  MOD_RES (6)..(7): Xaa is C or S
YVPKPXXAPTKLSAISVLYL

SEQ ID NO: 1737 - protein, 16 aa, Artificial Sequence
  Non-cyclic GFR-binding peptide
  MOD_RES (2)..(3): Xaa is C or S
PXXVPQALNAISILYF

SEQ ID NO: 1738 - protein, 10 aa, Artificial Sequence
  Non-cyclic GFR-binding peptide
KLSAISVLYL

SEQ ID NO: 1739 - protein, 14 aa, Artificial Sequence
  Non-cyclic GFR-binding peptide
  MOD_RES (1)..(1): Xaa is C or S
XAPTKLSPISVLYK

SEQ ID NO: 1740 - protein, 15 aa, Artificial Sequence
  Non-cyclic GFR-binding peptide
  MOD_RES (1)..(2): Xaa is C or S
XXVSQDLSAISILYL

SEQ ID NO: 1741 - protein, 18 aa, Artificial Sequence
  Non-cyclic GFR-binding peptide
  MOD_RES (4)..(5): Xaa is C or S
PKPXXAPTQLSPISVLYK

SEQ ID NO: 1742 - protein, 20 aa, Artificial Sequence
  Non-cyclic GFR-binding peptide
  MOD_RES (6)..(7): Xaa is C or S
KVGKAXXVPTKLNAISVLYF

SEQ ID NO: 1743 - protein, 13 aa, Artificial Sequence
  Non-cyclic GFR-binding peptide
APTQLSPISVLYK

SEQ ID NO: 1744 - protein, 18 aa, Artificial Sequence
  Non-cyclic GFR-binding peptide
  MOD_RES (4)..(5): Xaa is C or S
ASPXXVSQDLSATSILYY

SEQ ID NO: 1745 - protein, 10 aa, Artificial Sequence
  Non-cyclic GFR-binding peptide
ALSPISILYK

SEQ ID NO: 1746 - protein, 18 aa, Artificial Sequence
  Non-cyclic GFR-binding peptide
  MOD_RES (4)..(5): Xaa is C or S
PKAXXVPTELSATSMLYY

SEQ ID NO: 1747 - protein, 17 aa, Artificial Sequence
  Non-cyclic GFR-binding peptide
  MOD_RES (3)..(4): Xaa is C or S
KAXXAPTKLSPISVLYK

SEQ ID NO: 1748 - protein, 12 aa, Artificial Sequence
  Non-cyclic GFR-binding peptide
PQALSATSILYY

SEQ ID NO: 1749 - protein, 14 aa, Artificial Sequence
  Non-cyclic GFR-binding peptide
  MOD_RES (1)..(1): Xaa is C or S
XVPQALSATSILYY

SEQ ID NO: 1750 - protein, 12 aa, Artificial Sequence
  Non-cyclic GFR-binding peptide
PQDLSPISILYK

SEQ ID NO: 1751 - protein, 13 aa, Artificial Sequence
  Non-cyclic GFR-binding peptide
VPQALSPISILYK

SEQ ID NO: 1752 - protein, 13 aa, Artificial Sequence
  Non-cyclic GFR-binding peptide
TQVQLSATSVLYY

SEQ ID NO: 1753 - protein, 20 aa, Artificial Sequence
  Non-cyclic GFR-binding peptide
  MOD_RES (6)..(7): Xaa is C or S
ASAAPXXVPQALSATSILYY

SEQ ID NO: 1754 - protein, 15 aa, Artificial Sequence
  Non-cyclic GFR-binding peptide
  MOD_RES (1)..(2): Xaa is C or S
XXAPTQLSPISVLYK

SEQ ID NO: 1755 - protein, 11 aa, Artificial Sequence
  Non-cyclic GFR-binding peptide
TELSATSMLYY

SEQ ID NO: 1756 - protein, 19 aa, Artificial Sequence
  Non-cyclic GFR-binding peptide
  MOD_RES (5)..(6): Xaa is C or S
SAAPXXVPQALSAISILYL

SEQ ID NO: 1757 - protein, 15 aa, Artificial Sequence
  Non-cyclic GFR-binding peptide
  MOD_RES (1)..(2): Xaa is C or S
XXVPTELNAISMLYF

SEQ ID NO: 1758 - protein, 18 aa, Artificial Sequence
  Non-cyclic GFR-binding peptide
  MOD_RES (4)..(5): Xaa is C or S
PKPXXAPTKLSATSVLYY

SEQ ID NO: 1759 - protein, 14 aa, Artificial Sequence
  Non-cyclic GFR-binding peptide
  MOD_RES (1)..(1): Xaa is C or S
XVPQDLSPISILYK

SEQ ID NO: 1760 - protein, 20 aa, Artificial Sequence
  Non-cyclic GFR-binding peptide
  MOD_RES (6)..(7): Xaa is C or S
ASASPXXVPQDLSAISILYL

SEQ ID NO: 1761 - protein, 19 aa, Artificial Sequence
  Non-cyclic GFR-binding peptide
  MOD_RES (6)..(6): Xaa is C or S
VTKPTXAPTKLSPISVLYK

SEQ ID NO: 1762 - protein, 15 aa, Artificial Sequence
  Non-cyclic GFR-binding peptide
  MOD_RES (2)..(2): Xaa is C or S
TXAPTKLSAISVLYL

SEQ ID NO: 1763 - protein, 18 aa, Artificial Sequence
  Non-cyclic GFR-binding peptide
  MOD_RES (4)..(5): Xaa is C or S
PKAXXAPTKLSPISVLYK

SEQ ID NO: 1764 - protein, 12 aa, Artificial Sequence
  Non-cyclic GFR-binding peptide
PTKLSAISVLYL

SEQ ID NO: 1765 - protein, 15 aa, Artificial Sequence
  Non-cyclic GFR-binding peptide
  MOD_RES (1)..(2): Xaa is C or S
XXVPQDLSPISILYK

SEQ ID NO: 1766 - protein, 15 aa, Artificial Sequence
  Non-cyclic GFR-binding peptide
RPTQVQLSPISVLYK

SEQ ID NO: 1767 - protein, 17 aa, Artificial Sequence
  Non-cyclic GFR-binding peptide
  MOD_RES (2)..(2): Xaa is C or S
QXRPTQVQLNAISVLYF

SEQ ID NO: 1768 - protein, 13 aa, Artificial Sequence
  Non-cyclic GFR-binding peptide
VPTELNAISMLYF

SEQ ID NO: 1769 - protein, 19 aa, Artificial Sequence
  Non-cyclic GFR-binding peptide
  MOD_RES (5)..(6): Xaa is C or S
VPKPXXAPTKLSATSVLYY

SEQ ID NO: 1770 - protein, 20 aa, Artificial Sequence
  Non-cyclic GFR-binding peptide
  MOD_RES (6)..(7): Xaa is C or S
ASAAPXXVPQALSPISILYK

SEQ ID NO: 1771 - protein, 18 aa, Artificial Sequence
  Non-cyclic GFR-binding peptide
  MOD_RES (4)..(5): Xaa is C or S
PKPXXAPTQLSATSVLYY

SEQ ID NO: 1772 - protein, 20 aa, Artificial Sequence
  Non-cyclic GFR-binding peptide
  MOD_RES (6)..(7): Xaa is C or S
KIPKAXXVPTELSPISMLYK

SEQ ID NO: 1773 - protein, 17 aa, Artificial Sequence
  Non-cyclic GFR-binding peptide
  MOD_RES (3)..(4): Xaa is C or S
KPXXAPTQLSATSVLYY

SEQ ID NO: 1774 - protein, 20 aa, Artificial Sequence
  Non-cyclic GFR-binding peptide
  MOD_RES (6)..(7): Xaa is C or S
ASASPXXVSQDLSATSILYY

SEQ ID NO: 1775 - protein, 16 aa, Artificial Sequence
  Non-cyclic GFR-binding peptide
  MOD_RES (2)..(3): Xaa is C or S
AXXVPTKLSATSVLYY

SEQ ID NO: 1776 - protein, 12 aa, Artificial Sequence
  Non-cyclic GFR-binding peptide
SQDLSPISILYK

SEQ ID NO: 1777 - protein, 20 aa, Artificial Sequence
  Non-cyclic GFR-binding peptide
  MOD_RES (6)..(7): Xaa is C or S
KIPKAXXVPTELSATSMLYY

SEQ ID NO: 1778 - protein, 17 aa, Artificial Sequence
  Non-cyclic GFR-binding peptide
  MOD_RES (3)..(4): Xaa is C or S
KPXXAPTKLSPISVLYK

SEQ ID NO: 1779 - protein, 17 aa, Artificial Sequence
  Non-cyclic GFR-binding peptide
  MOD_RES (3)..(4): Xaa is C or S
KPXXAPTQLSPISVLYK

SEQ ID NO: 1780 - protein, 12 aa, Artificial Sequence
  Non-cyclic GFR-binding peptide
PQDLSATSILYY

SEQ ID NO: 1781 - protein, 16 aa, Artificial Sequence
  Non-cyclic GFR-binding peptide
  MOD_RES (2)..(3): Xaa is C or S
PXXVSQDLNAISILYF

SEQ ID NO: 1782 - protein, 14 aa, Artificial Sequence
  Non-cyclic GFR-binding peptide
  MOD_RES (1)..(1): Xaa is C or S
XVPQDLSATSILYY

SEQ ID NO: 1783 - protein, 18 aa, Artificial Sequence
  Non-cyclic GFR-binding peptide
  MOD_RES (3)..(3): Xaa is C or S
VQXRPTQVQLSPISVLYK

SEQ ID NO: 1784 - protein, 14 aa, Artificial Sequence
  Non-cyclic GFR-binding peptide
  MOD_RES (1)..(1): Xaa is C or S
XVPQALSPISILYK

SEQ ID NO: 1785 - protein, 14 aa, Artificial Sequence
  Non-cyclic GFR-binding peptide
  MOD_RES (1)..(1): Xaa is C or S
XVPTELNAISMLYF

SEQ ID NO: 1786 - protein, 17 aa, Artificial Sequence
  Non-cyclic GFR-binding peptide
  MOD_RES (3)..(4): Xaa is C or S
SPXXVSQDLSAISILYL

SEQ ID NO: 1787 - protein, 13 aa, Artificial Sequence
  Non-cyclic GFR-binding peptide
TQVQLSPISVLYK

SEQ ID NO: 1788 - protein, 20 aa, Artificial Sequence
  Non-cyclic GFR-binding peptide
  MOD_RES (5)..(5): Xaa is C or S
RNVQXRPTQVQLSPISVLYK

SEQ ID NO: 1789 - protein, 20 aa, Artificial Sequence
  Non-cyclic GFR-binding peptide
  MOD_RES (6)..(7): Xaa is C or S
ASASPXXVPQDLNAISILYF

SEQ ID NO: 1790 - protein, 12 aa, Artificial Sequence
  Non-cyclic GFR-binding peptide
PTQLSAISVLYL

SEQ ID NO: 1791 - protein, 18 aa, Artificial Sequence
  Non-cyclic GFR-binding peptide
  MOD_RES (5)..(5): Xaa is C or S
TKPTXAPTKLSPISVLYK

SEQ ID NO: 1792 - protein, 18 aa, Artificial Sequence
  Non-cyclic GFR-binding peptide
  MOD_RES (4)..(5): Xaa is C or S
PKPXXAPTKLSPISVLYK

SEQ ID NO: 1793 - protein, 14 aa, Artificial Sequence
  Non-cyclic GFR-binding peptide
  MOD_RES (1)..(1): Xaa is C or S
XVPTKLNAISVLYF

SEQ ID NO: 1794 - protein, 10 aa, Artificial Sequence
  Non-cyclic GFR-binding peptide
DLSPISILYK

SEQ ID NO: 1795 - protein, 15 aa, Artificial Sequence
  Non-cyclic GFR-binding peptide
  MOD_RES (1)..(2): Xaa is C or S
XXAPTQLSATSVLYY

SEQ ID NO: 1796 - protein, 14 aa, Artificial Sequence
  Non-cyclic GFR-binding peptide
  MOD_RES (1)..(1): Xaa is C or S
XVPTKLSAISVLYL

SEQ ID NO: 1797 - protein, 20 aa, Artificial Sequence
  Non-cyclic GFR-binding peptide
  MOD_RES (7)..(7): Xaa is C or S
HVTKPTXAPTKLSPISVLYK

SEQ ID NO: 1798 - protein, 13 aa, Artificial Sequence
  Non-cyclic GFR-binding peptide
APTKLSPISVLYK

SEQ ID NO: 1799 - protein, 19 aa, Artificial Sequence
  Non-cyclic GFR-binding peptide
  MOD_RES (6)..(6): Xaa is C or S
VTKPTXAPTKLSATSVLYY

SEQ ID NO: 1800 - protein, 16 aa, Artificial Sequence
  Non-cyclic GFR-binding peptide
  MOD_RES (2)..(3): Xaa is C or S
PXXVSQDLSAISILYL

SEQ ID NO: 1801 - protein, 13 aa, Artificial Sequence
  Non-cyclic GFR-binding peptide
APTQLSATSVLYY

SEQ ID NO: 1802 - protein, 19 aa, Artificial Sequence
  Non-cyclic GFR-binding peptide
  MOD_RES (4)..(4): Xaa is C or S
NVQXRPTQVQLSPISVLYK

SEQ ID NO: 1803 - protein, 17 aa, Artificial Sequence
  Non-cyclic GFR-binding peptide
  MOD_RES (3)..(4): Xaa is C or S
SPXXVSQDLNAISILYF

SEQ ID NO: 1804 - protein, 11 aa, Artificial Sequence
  Non-cyclic GFR-binding peptide
VQLSATSVLYY

SEQ ID NO: 1805 - protein, 13 aa, Artificial Sequence
  Non-cyclic GFR-binding peptide
IFLVSIPSLKTPA

SEQ ID NO: 1806 - protein, 14 aa, Artificial Sequence
  Non-cyclic GFR-binding peptide
  MOD_RES (14)..(14): Xaa is C or S
IFLISIPSLAQPVX

SEQ ID NO: 1807 - protein, 20 aa, Artificial Sequence
  Non-cyclic GFR-binding peptide
  MOD_RES (14)..(14): Xaa is C or S
IFLVSIPSLKTPAXTPKTVH

SEQ ID NO: 1808 - protein, 11 aa, Artificial Sequence
  Non-cyclic GFR-binding peptide
YYLVTLPELQT

SEQ ID NO: 1809 - protein, 13 aa, Artificial Sequence
  Non-cyclic GFR-binding peptide
YYVIPLPELDQPV

SEQ ID NO: 1810 - protein, 19 aa, Artificial Sequence
  Non-cyclic GFR-binding peptide
  MOD_RES (14)..(15): Xaa is C or S
YYLVTLPELKTPAXXPKPV

SEQ ID NO: 1811 - protein, 17 aa, Artificial Sequence
  Non-cyclic GFR-binding peptide
  MOD_RES (14)..(15): Xaa is C or S
YYLVTLPELQTPAXXPK

SEQ ID NO: 1812 - protein, 18 aa, Artificial Sequence
  Non-cyclic GFR-binding peptide
  MOD_RES (14)..(14): Xaa is C or S
YYLVTLPELKTPAXTPKT

SEQ ID NO: 1813 - protein, 16 aa, Artificial Sequence
  Non-cyclic GFR-binding peptide
  MOD_RES (14)..(15): Xaa is C or S
YYVVPLPELKTPAXXP

SEQ ID NO: 1814 - protein, 16 aa, Artificial Sequence
  Non-cyclic GFR-binding peptide
  MOD_RES (14)..(14): Xaa is C or S
YYLVTLPELKTPAXTP

SEQ ID NO: 1815 - protein, 13 aa, Artificial Sequence
  Non-cyclic GFR-binding peptide
LYLISIASLRTPV

SEQ ID NO: 1816 - protein, 19 aa, Artificial Sequence
  Non-cyclic GFR-binding peptide
  MOD_RES (14)..(15): Xaa is C or S
IFLISIPSLDQPVXXPSAS

SEQ ID NO: 1817 - protein, 9 aa, Artificial Sequence
  Non-cyclic GFR-binding peptide
YYVVPLPEL

SEQ ID NO: 1818 - protein, 20 aa, Artificial Sequence
  Non-cyclic GFR-binding peptide
  MOD_RES (14)..(15): Xaa is C or S
IFLVSIPSLKTPAXXPKPVY

SEQ ID NO: 1819 - protein, 16 aa, Artificial Sequence
  Non-cyclic GFR-binding peptide
  MOD_RES (14)..(15): Xaa is C or S
IFLMSIPSLETPVXXA

SEQ ID NO: 1820 - protein, 20 aa, Artificial Sequence
  Non-cyclic GFR-binding peptide
  MOD_RES (14)..(15): Xaa is C or S
IFLMSIPSLETPVXXAKPIS

SEQ ID NO: 1821 - protein, 10 aa, Artificial Sequence
  Non-cyclic GFR-binding peptide
YYVIPLPELD

SEQ ID NO: 1822 - protein, 13 aa, Artificial Sequence
  Non-cyclic GFR-binding peptide
YYLMTLPELETPV

SEQ ID NO: 1823 - protein, 11 aa, Artificial Sequence
  Non-cyclic GFR-binding peptide
YYVIPLPELRT

SEQ ID NO: 1824 - protein, 19 aa, Artificial Sequence
  Non-cyclic GFR-binding peptide
  MOD_RES (14)..(15): Xaa is C or S
YYVVPLPELKTPAXXPKPV

SEQ ID NO: 1825 - protein, 15 aa, Artificial Sequence
  Non-cyclic GFR-binding peptide
  MOD_RES (14)..(15): Xaa is C or S
YYLMTLPELETPVXX

SEQ ID NO: 1826 - protein, 9 aa, Artificial Sequence
  Non-cyclic GFR-binding peptide
IFLMSIPSL

SEQ ID NO: 1827 - protein, 15 aa, Artificial Sequence
  Non-cyclic GFR-binding peptide
  MOD_RES (14)..(15): Xaa is C or S
IFLISIPSLDQSVXX

SEQ ID NO: 1828 - protein, 16 aa, Artificial Sequence
  Non-cyclic GFR-binding peptide
  MOD_RES (14)..(15): Xaa is C or S
YYVIPLPELDQPVXXP

SEQ ID NO: 1829 - protein, 11 aa, Artificial Sequence
  Non-cyclic GFR-binding peptide
YYVVPLPELQT

SEQ ID NO: 1830 - protein, 17 aa, Artificial Sequence
  Non-cyclic GFR-binding peptide
  MOD_RES (14)..(14): Xaa is C or S
IFLVSIPSLKTPAXTPK

SEQ ID NO: 1831 - protein, 20 aa, Artificial Sequence
  Non-cyclic GFR-binding peptide
  MOD_RES (14)..(15): Xaa is C or S
YYVIPLPELDQSVXXPSASA

SEQ ID NO: 1832 - protein, 20 aa, Artificial Sequence
  Non-cyclic GFR-binding peptide
  MOD_RES (14)..(15): Xaa is C or S
LYLISIASLRTPVXXTPPTS

SEQ ID NO: 1833 - protein, 17 aa, Artificial Sequence
  Non-cyclic GFR-binding peptide
  MOD_RES (14)..(15): Xaa is C or S
YYVVPLPELQTPAXXPK

SEQ ID NO: 1834 - protein, 14 aa, Artificial Sequence
  Non-cyclic GFR-binding peptide
  MOD_RES (14)..(14): Xaa is C or S
YYVVPLPELQTPAX

SEQ ID NO: 1835 - protein, 17 aa, Artificial Sequence
  Non-cyclic GFR-binding peptide
  MOD_RES (14)..(14): Xaa is C or S
YYVVPLPELKTPAXTPK

SEQ ID NO: 1836 - protein, 19 aa, Artificial Sequence
  Non-cyclic GFR-binding peptide
  MOD_RES (14)..(15): Xaa is C or S
IFLMSIPSLETPVXXAKPI

SEQ ID NO: 1837 - protein, 10 aa, Artificial Sequence
  Non-cyclic GFR-binding peptide
YYLITLPELR

SEQ ID NO: 1838 - protein, 16 aa, Artificial Sequence
  Non-cyclic GFR-binding peptide
  MOD_RES (14)..(14): Xaa is C or S
YYVVPLPELKTPAXTP

SEQ ID NO: 1839 - protein, 19 aa, Artificial Sequence
  Non-cyclic GFR-binding peptide
  MOD_RES (14)..(15): Xaa is C or S
LYLISIASLRTPVXXTPPT

SEQ ID NO: 1840 - protein, 16 aa, Artificial Sequence
  Non-cyclic GFR-binding peptide
  MOD_RES (14)..(15): Xaa is C or S
YYLVTLPELKTPAXXP

SEQ ID NO: 1841 - protein, 17 aa, Artificial Sequence
  Non-cyclic GFR-binding peptide
  MOD_RES (14)..(15): Xaa is C or S
YYVIPLPELDQSVXXPS

SEQ ID NO: 1842 - protein, 19 aa, Artificial Sequence
  Non-cyclic GFR-binding peptide
  MOD_RES (14)..(15): Xaa is C or S
IFLISIPSLAQPVXXPAAS

SEQ ID NO: 1843 - protein, 14 aa, Artificial Sequence
  Non-cyclic GFR-binding peptide
  MOD_RES (14)..(14): Xaa is C or S
YYVIPLPELRTPVX

SEQ ID NO: 1844 - protein, 20 aa, Artificial Sequence
  Non-cyclic GFR-binding peptide
  MOD_RES (14)..(15): Xaa is C or S
YYLMTLPELETPVXXAKPIK

SEQ ID NO: 1845 - protein, 15 aa, Artificial Sequence
  Non-cyclic GFR-binding peptide
  MOD_RES (14)..(15): Xaa is C or S
YYVVPLPELKTPAXX

SEQ ID NO: 1846 - protein, 15 aa, Artificial Sequence
  Non-cyclic GFR-binding peptide
  MOD_RES (14)..(14): Xaa is C or S
IFLVSIPSLKTPAXT

SEQ ID NO: 1847 - protein, 13 aa, Artificial Sequence
  Non-cyclic GFR-binding peptide
IFLISIPSLDQPV

SEQ ID NO: 1848 - protein, 13 aa, Artificial Sequence
  Non-cyclic GFR-binding peptide
YYVVPLPELKTPA

SEQ ID NO: 1849 - protein, 13 aa, Artificial Sequence
  Non-cyclic GFR-binding peptide
IFLMSIPSLETPV

SEQ ID NO: 1850 - protein, 10 aa, Artificial Sequence
  Non-cyclic GFR-binding peptide
YYVIPLPELR

SEQ ID NO: 1851 - protein, 20 aa, Artificial Sequence
  Non-cyclic GFR-binding peptide
  MOD_RES (14)..(15): Xaa is C or S
YYVMPLPELETPVXXAKPIS

SEQ ID NO: 1852 - protein, 16 aa, Artificial Sequence
  Non-cyclic GFR-binding peptide
  MOD_RES (14)..(15): Xaa is C or S
YYLITLPELRTPVXXT

SEQ ID NO: 1853 - protein, 12 aa, Artificial Sequence
  Non-cyclic GFR-binding peptide
LYLISIASLRTP

SEQ ID NO: 1854 - protein, 14 aa, Artificial Sequence
  Non-cyclic GFR-binding peptide
  MOD_RES (14)..(14): Xaa is C or S
YYLITLPELRTPVX

SEQ ID NO: 1855 - protein, 14 aa, Artificial Sequence
  Non-cyclic GFR-binding peptide
  MOD_RES (14)..(14): Xaa is C or S
YYLVTLPELKTPAX

SEQ ID NO: 1856 - protein, 16 aa, Artificial Sequence
  Non-cyclic GFR-binding peptide
  MOD_RES (14)..(14): Xaa is C or S
IFLVSIPSLKTPAXTP

SEQ ID NO: 1857 - protein, 17 aa, Artificial Sequence
  Non-cyclic GFR-binding peptide
  MOD_RES (14)..(14): Xaa is C or S
YYLVTLPELKTPAXTPK

SEQ ID NO: 1858 - protein, 14 aa, Artificial Sequence
  Non-cyclic GFR-binding peptide
  MOD_RES (14)..(14): Xaa is C or S
IFLISIPSLDQSVX

SEQ ID NO: 1859 - protein, 19 aa, Artificial Sequence
  Non-cyclic GFR-binding peptide
  MOD_RES (14)..(14): Xaa is C or S
YYLVTLPELKTPAXTPKTV

SEQ ID NO: 1860 - protein, 9 aa, Artificial Sequence
  Non-cyclic GFR-binding peptide
IFLVSIPSL

SEQ ID NO: 1861 - protein, 15 aa, Artificial Sequence
  Non-cyclic GFR-binding peptide
  MOD_RES (14)..(14): Xaa is C or S
YYVVPLPELKTPAXT

SEQ ID NO: 1862 - protein, 16 aa, Artificial Sequence
  Non-cyclic GFR-binding peptide
  MOD_RES (14)..(15): Xaa is C or S
YYLMTLPELETPVXXA

SEQ ID NO: 1863 - protein, 11 aa, Artificial Sequence
  Non-cyclic GFR-binding peptide
IFLISIPSLAQ

SEQ ID NO: 1864 - protein, 20 aa, Artificial Sequence
  Non-cyclic GFR-binding peptide
  MOD_RES (14)..(15): Xaa is C or S
IFLISIPSLDQSVXXPSASA

SEQ ID NO: 1865 - protein, 15 aa, Artificial Sequence
  Non-cyclic GFR-binding peptide
  MOD_RES (14)..(15): Xaa is C or S
YYVIPLPELDQPVXX

SEQ ID NO: 1866 - protein, 14 aa, Artificial Sequence
  Non-cyclic GFR-binding peptide
  MOD_RES (14)..(14): Xaa is C or S
YYLVTLPELQTPAX

SEQ ID NO: 1867 - protein, 13 aa, Artificial Sequence
  Non-cyclic GFR-binding peptide
IFLISIPSLDQSV

SEQ ID NO: 1868 - protein, 18 aa, Artificial Sequence
  Non-cyclic GFR-binding peptide
  MOD_RES (14)..(15): Xaa is C or S
IFLISIPSLDQPVXXPSA

SEQ ID NO: 1869 - protein, 20 aa, Artificial Sequence
  Non-cyclic GFR-binding peptide
  MOD_RES (14)..(14): Xaa is C or S
YYVVPLPELKTPAXTPKTVH

SEQ ID NO: 1870 - protein, 19 aa, Artificial Sequence
  Non-cyclic GFR-binding peptide
  MOD_RES (14)..(15): Xaa is C or S
YYLMTLPELETPVXXAKPI

SEQ ID NO: 1871 - protein, 15 aa, Artificial Sequence
  Non-cyclic GFR-binding peptide
  MOD_RES (14)..(15): Xaa is C or S
IFLISIPSLAQPVXX

SEQ ID NO: 1872 - protein, 16 aa, Artificial Sequence
  Non-cyclic GFR-binding peptide
  MOD_RES (14)..(15): Xaa is C or S
IFLISIPSLDQPVXXP

SEQ ID NO: 1873 - protein, 17 aa, Artificial Sequence
  Non-cyclic GFR-binding peptide
  MOD_RES (14)..(15): Xaa is C or S
YYLMTLPELETPVXXAK

SEQ ID NO: 1874 - protein, 16 aa, Artificial Sequence
  Non-cyclic GFR-binding peptide
  MOD_RES (14)..(15): Xaa is C or S
IFLVSIPSLKTPAXXP

SEQ ID NO: 1875 - protein, 17 aa, Artificial Sequence
  Non-cyclic GFR-binding peptide
  MOD_RES (14)..(15): Xaa is C or S
YYLITLPELAQPVXXPA

SEQ ID NO: 1876 - protein, 10 aa, Artificial Sequence
  Non-cyclic GFR-binding peptide
YYLVTLPELQ

SEQ ID NO: 1877 - protein, 19 aa, Artificial Sequence
  Non-cyclic GFR-binding peptide
  MOD_RES (14)..(15): Xaa is C or S
YYVIPLPELDQPVXXPSAS

SEQ ID NO: 1878 - protein, 11 aa, Artificial Sequence
  Non-cyclic GFR-binding peptide
YYLITLPELAQ

SEQ ID NO: 1879 - protein, 14 aa, Artificial Sequence
  Non-cyclic GFR-binding peptide
  MOD_RES (14)..(14): Xaa is C or S
IFLVSIPSLQTPAX

SEQ ID NO: 1880 - protein, 19 aa, Artificial Sequence
  Non-cyclic GFR-binding peptide
  MOD_RES (14)..(15): Xaa is C or S
IFLVSIPSLQTPAXXPKPV

SEQ ID NO: 1881 - protein, 12 aa, Artificial Sequence
  Non-cyclic GFR-binding peptide
FYLISIANLRTP

SEQ ID NO: 1882 - protein, 20 aa, Artificial Sequence
  Non-cyclic GFR-binding peptide
  MOD_RES (14)..(15): Xaa is C or S
IFLVSIPSLQTPAXXPKPVT

SEQ ID NO: 1883 - protein, 9 aa, Artificial Sequence
  Non-cyclic GFR-binding peptide
YYVMPLPEL

SEQ ID NO: 1884 - protein, 14 aa, Artificial Sequence
  Non-cyclic GFR-binding peptide
  MOD_RES (14)..(14): Xaa is C or S
YYVIPLPELDQSVX

SEQ ID NO: 1885 - protein, 13 aa, Artificial Sequence
  Non-cyclic GFR-binding peptide
YYVMPLPELETPV

SEQ ID NO: 1886 - protein, 11 aa, Artificial Sequence
  Non-cyclic GFR-binding peptide
IFLVSIPSLQT

SEQ ID NO: 1887 - protein, 18 aa, Artificial Sequence
  Non-cyclic GFR-binding peptide
  MOD_RES (14)..(15): Xaa is C or S
IFLISIPSLAQPVXXPAA

SEQ ID NO: 1888 - protein, 15 aa, Artificial Sequence
  Non-cyclic GFR-binding peptide
  MOD_RES (14)..(15): Xaa is C or S
YYVMPLPELETPVXX

SEQ ID NO: 1889 - protein, 9 aa, Artificial Sequence
  Non-cyclic GFR-binding peptide
YYLVTLPEL

SEQ ID NO: 1890 - protein, 13 aa, Artificial Sequence
  Non-cyclic GFR-binding peptide
IFLVSIPSLQTPA

SEQ ID NO: 1891 - protein, 13 aa, Artificial Sequence
  Non-cyclic GFR-binding peptide
YYVIPLPELDQSV

SEQ ID NO: 1892 - protein, 19 aa, Artificial Sequence
  Non-cyclic GFR-binding peptide
  MOD_RES (14)..(15): Xaa is C or S
YYLVTLPELQTPAXXPKPV

SEQ ID NO: 1893 - protein, 14 aa, Artificial Sequence
  Non-cyclic GFR-binding peptide
  MOD_RES (14)..(14): Xaa is C or S
YYLMTLPELETPVX

SEQ ID NO: 1894 - protein, 10 aa, Artificial Sequence
  Non-cyclic GFR-binding peptide
IFLISIPSLA

SEQ ID NO: 1895 - protein, 15 aa, Artificial Sequence
  Non-cyclic GFR-binding peptide
  MOD_RES (14)..(15): Xaa is C or S
YYVIPLPELRTPVXX

SEQ ID NO: 1896 - protein, 20 aa, Artificial Sequence
  Non-cyclic GFR-binding peptide
  MOD_RES (14)..(15): Xaa is C or S
YYLVTLPELKTPAXXPKPVY

SEQ ID NO: 1897 - protein, 14 aa, Artificial Sequence
  Non-cyclic GFR-binding peptide
  MOD_RES (14)..(14): Xaa is C or S
YYVMPLPELETPVX

SEQ ID NO: 1898 - protein, 17 aa, Artificial Sequence
  Non-cyclic GFR-binding peptide
  MOD_RES (14)..(15): Xaa is C or S
YYVIPLPELDQPVXXPS

SEQ ID NO: 1899 - protein, 13 aa, Artificial Sequence
  Non-cyclic GFR-binding peptide
IFLISIPSLAQPV

SEQ ID NO: 1900 - protein, 16 aa, Artificial Sequence
  Non-cyclic GFR-binding peptide
  MOD_RES (14)..(15): Xaa is C or S
YYVIPLPELDQSVXXP

SEQ ID NO: 1901 - protein, 20 aa, Artificial Sequence
  Non-cyclic GFR-binding peptide
  MOD_RES (14)..(15): Xaa is C or S
YYLMTLPELETPVXXAKPIS

SEQ ID NO: 1902 - protein, 12 aa, Artificial Sequence
  Non-cyclic GFR-binding peptide
IFLISIPSLDQS

SEQ ID NO: 1903 - protein, 16 aa, Artificial Sequence
  Non-cyclic GFR-binding peptide
  MOD_RES (14)..(15): Xaa is C or S
FYLISIANLRTPVXXT

SEQ ID NO: 1904 - protein, 9 aa, Artificial Sequence
  Non-cyclic GFR-binding peptide
YYLMTLPEL

SEQ ID NO: 1905 - protein, 10 aa, Artificial Sequence
  Non-cyclic GFR-binding peptide
YYLVTLPELK

SEQ ID NO: 1906 - protein, 15 aa, Artificial Sequence
  Non-cyclic GFR-binding peptide
  MOD_RES (14)..(15): Xaa is C or S
YYVIPLPELDQSVXX

SEQ ID NO: 1907 - protein, 12 aa, Artificial Sequence
  Non-cyclic GFR-binding peptide
YYLMTLPELETP

SEQ ID NO: 1908 - protein, 20 aa, Artificial Sequence
  Non-cyclic GFR-binding peptide
  MOD_RES (14)..(15): Xaa is C or S
YYLVTLPELQTPAXXPKPVT

SEQ ID NO: 1909 - protein, 14 aa, Artificial Sequence
  Non-cyclic GFR-binding peptide
  MOD_RES (14)..(14): Xaa is C or S
IFLVSIPSLKTPAX

SEQ ID NO: 1910 - protein, 10 aa, Artificial Sequence
  Non-cyclic GFR-binding peptide
FYLISIANLR

SEQ ID NO: 1911 - protein, 12 aa, Artificial Sequence
  Non-cyclic GFR-binding peptide
YYVVPLPELKTP

SEQ ID NO: 1912 - protein, 15 aa, Artificial Sequence
  Non-cyclic GFR-binding peptide
  MOD_RES (14)..(15): Xaa is C or S
YYLITLPELRTPVXX

SEQ ID NO: 1913 - protein, 16 aa, Artificial Sequence
  Non-cyclic GFR-binding peptide
  MOD_RES (14)..(15): Xaa is C or S
IFLVSIPSLQTPAXXP

SEQ ID NO: 1914 - protein, 10 aa, Artificial Sequence
  Non-cyclic GFR-binding peptide
IFLISIPSLD

SEQ ID NO: 1915 - protein, 15 aa, Artificial Sequence
  Non-cyclic GFR-binding peptide
  MOD_RES (14)..(15): Xaa is C or S
IFLISIPSLDQPVXX

SEQ ID NO: 1916 - protein, 19 aa, Artificial Sequence
  Non-cyclic GFR-binding peptide
  MOD_RES (14)..(15): Xaa is C or S
IFLVSIPSLKTPAXXPKPV

SEQ ID NO: 1917 - protein, 19 aa, Artificial Sequence
  Non-cyclic GFR-binding peptide
  MOD_RES (14)..(15): Xaa is C or S
YYLITLPELAQPVXXPAAS

SEQ ID NO: 1918 - protein, 14 aa, Artificial Sequence
  Non-cyclic GFR-binding peptide
  MOD_RES (14)..(14): Xaa is C or S
IFLISIPSLDQPVX

SEQ ID NO: 1919 - protein, 10 aa, Artificial Sequence
  Non-cyclic GFR-binding peptide
YYVVPLPELK

SEQ ID NO: 1920 - protein, 19 aa, Artificial Sequence
  Non-cyclic GFR-binding peptide
  MOD_RES (14)..(15): Xaa is C or S
YYVIPLPELRTPVXXTPPT

SEQ ID NO: 1921 - protein, 17 aa, Artificial Sequence
  Non-cyclic GFR-binding peptide
  MOD_RES (14)..(15): Xaa is C or S
YYLITLPELRTPVXXTP

SEQ ID NO: 1922 - protein, 10 aa, Artificial Sequence
  Non-cyclic GFR-binding peptide
YYVVPLPELQ

SEQ ID NO: 1923 - protein, 15 aa, Artificial Sequence
  Non-cyclic GFR-binding peptide
  MOD_RES (14)..(15): Xaa is C or S
IFLVSIPSLKTPAXX

SEQ ID NO: 1924 - protein, 12 aa, Artificial Sequence
  Non-cyclic GFR-binding peptide
YYVMPLPELETP

SEQ ID NO: 1925 - protein, 18 aa, Artificial Sequence
  Non-cyclic GFR-binding peptide
  MOD_RES (14)..(15): Xaa is C or S
YYVIPLPELRTPVXXTPP

SEQ ID NO: 1926 - protein, 18 aa, Artificial Sequence
  Non-cyclic GFR-binding peptide
  MOD_RES (14)..(15): Xaa is C or S
IFLVSIPSLKTPAXXPKP

SEQ ID NO: 1927 - protein, 18 aa, Artificial Sequence
  Non-cyclic GFR-binding peptide
  MOD_RES (14)..(15): Xaa is C or S
IFLVSIPSLQTPAXXPKP

SEQ ID NO: 1928 - protein, 15 aa, Artificial Sequence
  Non-cyclic GFR-binding peptide
  MOD_RES (14)..(15): Xaa is C or S
IFLVSIPSLQTPAXX

SEQ ID NO: 1929 - protein, 19 aa, Artificial Sequence
  Non-cyclic GFR-binding peptide
  MOD_RES (14)..(14): Xaa is C or S
IFLVSIPSLKTPAXTPKTV

SEQ ID NO: 1930 - protein, 16 aa, Artificial Sequence
  Non-cyclic GFR-binding peptide
  MOD_RES (14)..(15): Xaa is C or S
LYLISIASLRTPVXXT

SEQ ID NO: 1931 - protein, 12 aa, Artificial Sequence
  Non-cyclic GFR-binding peptide
IFLISIPSLAQP

SEQ ID NO: 1932 - protein, 18 aa, Artificial Sequence
  Non-cyclic GFR-binding peptide
  MOD_RES (14)..(14): Xaa is C or S
IFLVSIPSLKTPAXTPKT

SEQ ID NO: 1933 - protein, 19 aa, Artificial Sequence
  Non-cyclic GFR-binding peptide
  MOD_RES (14)..(15): Xaa is C or S
YYVMPLPELETPVXXAKPI

SEQ ID NO: 1934 - protein, 12 aa, Artificial Sequence
  Non-cyclic GFR-binding peptide
YYLVTLPELKTP

SEQ ID NO: 1935 - protein, 13 aa, Artificial Sequence
  Non-cyclic GFR-binding peptide
YYVIPLPELRTPV

SEQ ID NO: 1936 - protein, 12 aa, Artificial Sequence
  Non-cyclic GFR-binding peptide
IFLISIPSLDQP

SEQ ID NO: 1937 - protein, 20 aa, Artificial Sequence
  Non-cyclic GFR-binding peptide
  MOD_RES (14)..(15): Xaa is C or S
IFLMSIPSLETPVXXAKPIK

SEQ ID NO: 1938 - protein, 15 aa, Artificial Sequence
  Non-cyclic GFR-binding peptide
  MOD_RES (14)..(14): Xaa is C or S
YYLVTLPELKTPAXT

SEQ ID NO: 1939 - protein, 10 aa, Artificial Sequence
  Non-cyclic GFR-binding peptide
YYVMPLPELE

SEQ ID NO: 1940 - protein, 19 aa, Artificial Sequence
  Non-cyclic GFR-binding peptide
  MOD_RES (14)..(15): Xaa is C or S
YYVIPLPELDQSVXXPSAS

SEQ ID NO: 1941 - protein, 11 aa, Artificial Sequence
  Non-cyclic GFR-binding peptide
YYLITLPELRT

SEQ ID NO: 1942 - protein, 17 aa, Artificial Sequence
  Non-cyclic GFR-binding peptide
  MOD_RES (14)..(15): Xaa is C or S
IFLVSIPSLQTPAXXPK

SEQ ID NO: 1943 - protein, 18 aa, Artificial Sequence
  Non-cyclic GFR-binding peptide
  MOD_RES (14)..(15): Xaa is C or S
IFLISIPSLDQSVXXPSA

SEQ ID NO: 1944 - protein, 20 aa, Artificial Sequence
  Non-cyclic GFR-binding peptide
  MOD_RES (14)..(15): Xaa is C or S
YYVVPLPELKTPAXXPKPVY

SEQ ID NO: 1945 - protein, 11 aa, Artificial Sequence
  Non-cyclic GFR-binding peptide
IFLMSIPSLET

SEQ ID NO: 1946 - protein, 20 aa, Artificial Sequence
  Non-cyclic GFR-binding peptide
  MOD_RES (14)..(15): Xaa is C or S
YYLITLPELRTPVXXTPPTS

SEQ ID NO: 1947 - protein, 12 aa, Artificial Sequence
  Non-cyclic GFR-binding peptide
YYVVPLPELQTP

SEQ ID NO: 1948 - protein, 18 aa, Artificial Sequence
  Non-cyclic GFR-binding peptide
  MOD_RES (14)..(15): Xaa is C or S
YYLVTLPELKTPAXXPKP

SEQ ID NO: 1949 - protein, 18 aa, Artificial Sequence
  Non-cyclic GFR-binding peptide
  MOD_RES (14)..(15): Xaa is C or S
YYVMPLPELETPVXXAKP

SEQ ID NO: 1950 - protein, 18 aa, Artificial Sequence
  Non-cyclic GFR-binding peptide
  MOD_RES (14)..(15): Xaa is C or S
YYVIPLPELDQSVXXPSA

SEQ ID NO: 1951 - protein, 10 aa, Artificial Sequence
  Non-cyclic GFR-binding peptide
IFLVSIPSLK

SEQ ID NO: 1952 - protein, 10 aa, Artificial Sequence
  Non-cyclic GFR-binding peptide
LYLISIASLR

SEQ ID NO: 1953 - protein, 20 aa, Artificial Sequence
  Non-cyclic GFR-binding peptide
  MOD_RES (14)..(15): Xaa is C or S
IFLISIPSLAQPVXXPAASA

SEQ ID NO: 1954 - protein, 10 aa, Artificial Sequence
  Non-cyclic GFR-binding peptide
IFLMSIPSLE

SEQ ID NO: 1955 - protein, 13 aa, Artificial Sequence
  Non-cyclic GFR-binding peptide
YYLITLPELAQPV

SEQ ID NO: 1956 - protein, 17 aa, Artificial Sequence
  Non-cyclic GFR-binding peptide
  MOD_RES (14)..(15): Xaa is C or S
YYVIPLPELRTPVXXTP

SEQ ID NO: 1957 - protein, 13 aa, Artificial Sequence
  Non-cyclic GFR-binding peptide
YYLVTLPELQTPA

SEQ ID NO: 1958 - protein, 18 aa, Artificial Sequence
  Non-cyclic GFR-binding peptide
  MOD_RES (14)..(15): Xaa is C or S
YYLITLPELRTPVXXTPP

SEQ ID NO: 1959 - protein, 12 aa, Artificial Sequence
  Non-cyclic GFR-binding peptide
YYLVTLPELQTP

SEQ ID NO: 1960 - protein, 18 aa, Artificial Sequence
  Non-cyclic GFR-binding peptide
  MOD_RES (14)..(15): Xaa is C or S
YYVVPLPELKTPAXXPKP

SEQ ID NO: 1961 - protein, 11 aa, Artificial Sequence
  Non-cyclic GFR-binding peptide
LYLISIASLRT

SEQ ID NO: 1962 - protein, 11 aa, Artificial Sequence
  Non-cyclic GFR-binding peptide
IFLVSIPSLKT

SEQ ID NO: 1963 - protein, 13 aa, Artificial Sequence
  Non-cyclic GFR-binding peptide
YYLITLPELRTPV

SEQ ID NO: 1964 - protein, 11 aa, Artificial Sequence
  Non-cyclic GFR-binding peptide
YYVMPLPELET

SEQ ID NO: 1965 - protein, 20 aa, Artificial Sequence
  Non-cyclic GFR-binding peptide
  MOD_RES (14)..(15): Xaa is C or S
IFLISIPSLDQPVXXPSASA

SEQ ID NO: 1966 - protein, 17 aa, Artificial Sequence
  Non-cyclic GFR-binding peptide
  MOD_RES (14)..(15): Xaa is C or S
IFLVSIPSLKTPAXXPK

SEQ ID NO: 1967 - protein, 12 aa, Artificial Sequence
  Non-cyclic GFR-binding peptide
YYVIPLPELRTP

SEQ ID NO: 1968 - protein, 16 aa, Artificial Sequence
  Non-cyclic GFR-binding peptide
  MOD_RES (14)..(15): Xaa is C or S
YYLITLPELAQPVXXP

SEQ ID NO: 1969 - protein, 11 aa, Artificial Sequence
  Non-cyclic GFR-binding peptide
YYVIPLPELDQ

SEQ ID NO: 1970 - protein, 18 aa, Artificial Sequence
  Non-cyclic GFR-binding peptide
  MOD_RES (14)..(15): Xaa is C or S
YYLMTLPELETPVXXAKP

SEQ ID NO: 1971 - protein, 17 aa, Artificial Sequence
  Non-cyclic GFR-binding peptide
  MOD_RES (14)..(15): Xaa is C or S
IFLMSIPSLETPVXXAK

SEQ ID NO: 1972 - protein, 10 aa, Artificial Sequence
  Non-cyclic GFR-binding peptide
YYLMTLPELE

SEQ ID NO: 1973 - protein, 17 aa, Artificial Sequence
  Non-cyclic GFR-binding peptide
  MOD_RES (14)..(15): Xaa is C or S
IFLISIPSLAQPVXXPA

SEQ ID NO: 1974 - protein, 20 aa, Artificial Sequence
  Non-cyclic GFR-binding peptide
  MOD_RES (14)..(15): Xaa is C or S
YYVIPLPELDQPVXXPSASA

SEQ ID NO: 1975 - protein, 17 aa, Artificial Sequence
  Non-cyclic GFR-binding peptide
  MOD_RES (14)..(15): Xaa is C or S
YYVVPLPELKTPAXXPK

SEQ ID NO: 1976 - protein, 12 aa, Artificial Sequence
  Non-cyclic GFR-binding peptide
YYVIPLPELDQS

SEQ ID NO: 1977 - protein, 14 aa, Artificial Sequence
  Non-cyclic GFR-binding peptide
  MOD_RES (14)..(14): Xaa is C or S
FYLISIANLRTPVX

SEQ ID NO: 1978 - protein, 12 aa, Artificial Sequence
  Non-cyclic GFR-binding peptide
YYLITLPELRTP

SEQ ID NO: 1979 - protein, 14 aa, Artificial Sequence
  Non-cyclic GFR-binding peptide
  MOD_RES (14)..(14): Xaa is C or S
LYLISIASLRTPVX

SEQ ID NO: 1980 - protein, 11 aa, Artificial Sequence
  Non-cyclic GFR-binding peptide
YYLMTLPELET

SEQ ID NO: 1981 - protein, 19 aa, Artificial Sequence
  Non-cyclic GFR-binding peptide
  MOD_RES (14)..(15): Xaa is C or S
YYLITLPELRTPVXXTPPT

SEQ ID NO: 1982 - protein, 20 aa, Artificial Sequence
  Non-cyclic GFR-binding peptide
  MOD_RES (14)..(15): Xaa is C or S
YYVIPLPELRTPVXXTPPTS

SEQ ID NO: 1983 - protein, 11 aa, Artificial Sequence
  Non-cyclic GFR-binding peptide
IFLISIPSLDQ

SEQ ID NO: 1984 - protein, 18 aa, Artificial Sequence
  Non-cyclic GFR-binding peptide
  MOD_RES (14)..(15): Xaa is C or S
IFLMSIPSLETPVXXAKP

SEQ ID NO: 1985 - protein, 17 aa, Artificial Sequence
  Non-cyclic GFR-binding peptide
  MOD_RES (14)..(15): Xaa is C or S
YYVMPLPELETPVXXAK

SEQ ID NO: 1986 - protein, 18 aa, Artificial Sequence
  Non-cyclic GFR-binding peptide
  MOD_RES (14)..(15): Xaa is C or S
FYLISIANLRTPVXXTPP

SEQ ID NO: 1987 - protein, 11 aa, Artificial Sequence
  Non-cyclic GFR-binding peptide
YYLVTLPELKT

SEQ ID NO: 1988 - protein, 15 aa, Artificial Sequence
  Non-cyclic GFR-binding peptide
  MOD_RES (14)..(15): Xaa is C or S
YYVVPLPELQTPAXX

SEQ ID NO: 1989 - protein, 17 aa, Artificial Sequence
  Non-cyclic GFR-binding peptide
  MOD_RES (14)..(15): Xaa is C or S
YYLVTLPELKTPAXXPK

SEQ ID NO: 1990 - protein, 19 aa, Artificial Sequence
  Non-cyclic GFR-binding peptide
  MOD_RES (14)..(15): Xaa is C or S
IFLISIPSLDQSVXXPSAS

SEQ ID NO: 1991 - protein, 20 aa, Artificial Sequence
  Non-cyclic GFR-binding peptide
  MOD_RES (14)..(15): Xaa is C or S
YYLITLPELAQPVXXPAASA

SEQ ID NO: 1992 - protein, 10 aa, Artificial Sequence
  Non-cyclic GFR-binding peptide
IFLVSIPSLQ

SEQ ID NO: 1993 - protein, 14 aa, Artificial Sequence
  Non-cyclic GFR-binding peptide
  MOD_RES (14)..(14): Xaa is C or S
YYVIPLPELDQPVX

SEQ ID NO: 1994 - protein, 15 aa, Artificial Sequence
  Non-cyclic GFR-binding peptide
  MOD_RES (14)..(15): Xaa is C or S
IFLMSIPSLETPVXX

SEQ ID NO: 1995 - protein, 18 aa, Artificial Sequence
  Non-cyclic GFR-binding peptide
  MOD_RES (14)..(15): Xaa is C or S
YYLVTLPELQTPAXXPKP

SEQ ID NO: 1996 - protein, 20 aa, Artificial Sequence
  Non-cyclic GFR-binding peptide
  MOD_RES (14)..(15): Xaa is C or S
YYVVPLPELQTPAXXPKPVT

SEQ ID NO: 1997 - protein, 16 aa, Artificial Sequence
  Non-cyclic GFR-binding peptide
  MOD_RES (14)..(15): Xaa is C or S
YYVVPLPELQTPAXXP

SEQ ID NO: 1998 - protein, 17 aa, Artificial Sequence
  Non-cyclic GFR-binding peptide
  MOD_RES (14)..(15): Xaa is C or S
LYLISIASLRTPVXXTP

SEQ ID NO: 1999 - protein, 19 aa, Artificial Sequence
  Non-cyclic GFR-binding peptide
  MOD_RES (14)..(15): Xaa is C or S
FYLISIANLRTPVXXTPPT

SEQ ID NO: 2000 - protein, 18 aa, Artificial Sequence
  Non-cyclic GFR-binding peptide
  MOD_RES (14)..(15): Xaa is C or S
YYLITLPELAQPVXXPAA

SEQ ID NO: 2001 - protein, 11 aa, Artificial Sequence
  Non-cyclic GFR-binding peptide
YYVVPLPELKT

SEQ ID NO: 2002 - protein, 19 aa, Artificial Sequence
  Non-cyclic GFR-binding peptide
  MOD_RES (14)..(15): Xaa is C or S
YYVVPLPELQTPAXXPKPV

SEQ ID NO: 2003 - protein, 20 aa, Artificial Sequence
  Non-cyclic GFR-binding peptide
  MOD_RES (14)..(15): Xaa is C or S
FYLISIANLRTPVXXTPPTS

SEQ ID NO: 2004 - protein, 15 aa, Artificial Sequence
  Non-cyclic GFR-binding peptide
  MOD_RES (14)..(15): Xaa is C or S
YYLVTLPELQTPAXX

SEQ ID NO: 2005 - protein, 13 aa, Artificial Sequence
  Non-cyclic GFR-binding peptide
FYLISIANLRTPV

SEQ ID NO: 2006 - protein, 17 aa, Artificial Sequence
  Non-cyclic GFR-binding peptide
  MOD_RES (14)..(15): Xaa is C or S
IFLISIPSLDQPVXXPS

SEQ ID NO: 2007 - protein, 16 aa, Artificial Sequence
  Non-cyclic GFR-binding peptide
  MOD_RES (14)..(15): Xaa is C or S
IFLISIPSLAQPVXXP

SEQ ID NO: 2008 - protein, 18 aa, Artificial Sequence
  Non-cyclic GFR-binding peptide
  MOD_RES (14)..(15): Xaa is C or S
YYVIPLPELDQPVXXPSA

SEQ ID NO: 2009 - protein, 12 aa, Artificial Sequence
  Non-cyclic GFR-binding peptide
IFLVSIPSLQTP

SEQ ID NO: 2010 - protein, 15 aa, Artificial Sequence
  Non-cyclic GFR-binding peptide
  MOD_RES (14)..(15): Xaa is C or S
LYLISIASLRTPVXX

SEQ ID NO: 2011 - protein, 12 aa, Artificial Sequence
  Non-cyclic GFR-binding peptide
IFLVSIPSLKTP

SEQ ID NO: 2012 - protein, 12 aa, Artificial Sequence
  Non-cyclic GFR-binding peptide
YYLITLPELAQP

SEQ ID NO: 2013 - protein, 15 aa, Artificial Sequence
  Non-cyclic GFR-binding peptide
  MOD_RES (14)..(15): Xaa is C or S
FYLISIANLRTPVXX

SEQ ID NO: 2014 - protein, 18 aa, Artificial Sequence
  Non-cyclic GFR-binding peptide
  MOD_RES (14)..(14): Xaa is C or S
YYVVPLPELKTPAXTPKT

SEQ ID NO: 2015 - protein, 11 aa, Artificial Sequence
  Non-cyclic GFR-binding peptide
FYLISIANLRT

SEQ ID NO: 2016 - protein, 15 aa, Artificial Sequence
  Non-cyclic GFR-binding peptide
  MOD_RES (14)..(15): Xaa is C or S
YYLITLPELAQPVXX

SEQ ID NO: 2017 - protein, 13 aa, Artificial Sequence
  Non-cyclic GFR-binding peptide
YYLVTLPELKTPA

SEQ ID NO: 2018 - protein, 20 aa, Artificial Sequence
  Non-cyclic GFR-binding peptide
  MOD_RES (14)..(15): Xaa is C or S
YYVMPLPELETPVXXAKPIK

SEQ ID NO: 2019 - protein, 10 aa, Artificial Sequence
  Non-cyclic GFR-binding peptide
YYLITLPELA

SEQ ID NO: 2020 - protein, 14 aa, Artificial Sequence
  Non-cyclic GFR-binding peptide
  MOD_RES (14)..(14): Xaa is C or S
YYLITLPELAQPVX

SEQ ID NO: 2021 - protein, 17 aa, Artificial Sequence
  Non-cyclic GFR-binding peptide
  MOD_RES (14)..(15): Xaa is C or S
IFLISIPSLDQSVXXPS

SEQ ID NO: 2022 - protein, 15 aa, Artificial Sequence
  Non-cyclic GFR-binding peptide
  MOD_RES (14)..(15): Xaa is C or S
YYLVTLPELKTPAXX

SEQ ID NO: 2023 - protein, 20 aa, Artificial Sequence
  Non-cyclic GFR-binding peptide
  MOD_RES (14)..(14): Xaa is C or S
YYLVTLPELKTPAXTPKTVH

SEQ ID NO: 2024 - protein, 12 aa, Artificial Sequence
  Non-cyclic GFR-binding peptide
YYVIPLPELDQP

SEQ ID NO: 2025 - protein, 14 aa, Artificial Sequence
  Non-cyclic GFR-binding peptide
  MOD_RES (14)..(14): Xaa is C or S
YYVVPLPELKTPAX

SEQ ID NO: 2026 - protein, 16 aa, Artificial Sequence
  Non-cyclic GFR-binding peptide
  MOD_RES (14)..(15): Xaa is C or S
YYVIPLPELRTPVXXT

SEQ ID NO: 2027 - protein, 18 aa, Artificial Sequence
  Non-cyclic GFR-binding peptide
  MOD_RES (14)..(15): Xaa is C or S
YYVVPLPELQTPAXXPKP

SEQ ID NO: 2028 - protein, 16 aa, Artificial Sequence
  Non-cyclic GFR-binding peptide
  MOD_RES (14)..(15): Xaa is C or S
YYLVTLPELQTPAXXP

SEQ ID NO: 2029 - protein, 17 aa, Artificial Sequence
  Non-cyclic GFR-binding peptide
  MOD_RES (14)..(15): Xaa is C or S
FYLISIANLRTPVXXTP

SEQ ID NO: 2030 - protein, 19 aa, Artificial Sequence
  Non-cyclic GFR-binding peptide
  MOD_RES (14)..(14): Xaa is C or S
YYVVPLPELKTPAXTPKTV

SEQ ID NO: 2031 - protein, 16 aa, Artificial Sequence
  Non-cyclic GFR-binding peptide
  MOD_RES (14)..(15): Xaa is C or S
IFLISIPSLDQSVXXP

SEQ ID NO: 2032 - protein, 13 aa, Artificial Sequence
  Non-cyclic GFR-binding peptide
YYVVPLPELQTPA

SEQ ID NO: 2033 - protein, 16 aa, Artificial Sequence
  Non-cyclic GFR-binding peptide
  MOD_RES (14)..(15): Xaa is C or S
YYVMPLPELETPVXXA

SEQ ID NO: 2034 - protein, 12 aa, Artificial Sequence
  Non-cyclic GFR-binding peptide
IFLMSIPSLETP

SEQ ID NO: 2035 - protein, 18 aa, Artificial Sequence
  Non-cyclic GFR-binding peptide
  MOD_RES (14)..(15): Xaa is C or S
LYLISIASLRTPVXXTPP

SEQ ID NO: 2036 - protein, 14 aa, Artificial Sequence
  Non-cyclic GFR-binding peptide
  MOD_RES (14)..(14): Xaa is C or S
IFLMSIPSLETPVX

SEQ ID NO: 2037 - protein, 13 aa, Artificial Sequence
  Non-cyclic GFR-binding peptide
APTKLSPISVLFI

SEQ ID NO: 2038 - protein, 14 aa, Artificial Sequence
  Non-cyclic GFR-binding peptide
  MOD_RES (1)..(1): Xaa is C or S
XVPQALSPISILFI

SEQ ID NO: 2039 - protein, 20 aa, Artificial Sequence
  Non-cyclic GFR-binding peptide
  MOD_RES (7)..(7): Xaa is C or S
HVTKPTXAPTKLSPISVLFI

SEQ ID NO: 2040 - protein, 11 aa, Artificial Sequence
  Non-cyclic GFR-binding peptide
TQLEPLTVLYY

SEQ ID NO: 2041 - protein, 13 aa, Artificial Sequence
  Non-cyclic GFR-binding peptide
VPQDLEPLPIVYY

SEQ ID NO: 2042 - protein, 19 aa, Artificial Sequence
  Non-cyclic GFR-binding peptide
  MOD_RES (5)..(6): Xaa is C or S
VPKPXXAPTKLEPLTVLYY

SEQ ID NO: 2043 - protein, 17 aa, Artificial Sequence
  Non-cyclic GFR-binding peptide
  MOD_RES (3)..(4): Xaa is C or S
KPXXAPTQLEPLTVLYY

SEQ ID NO: 2044 - protein, 18 aa, Artificial Sequence
  Non-cyclic GFR-binding peptide
  MOD_RES (5)..(5): Xaa is C or S
TKPTXAPTKLEPLTVLYY

SEQ ID NO: 2045 - protein, 16 aa, Artificial Sequence
  Non-cyclic GFR-binding peptide
  MOD_RES (2)..(3): Xaa is C or S
PXXAPTKLEPLPVVYY

SEQ ID NO: 2046 - protein, 16 aa, Artificial Sequence
  Non-cyclic GFR-binding peptide
  MOD_RES (3)..(3): Xaa is C or S
PTXAPTKLEPLTVLYY

SEQ ID NO: 2047 - protein, 13 aa, Artificial Sequence
  Non-cyclic GFR-binding peptide
VPTRLSAISILYL

SEQ ID NO: 2048 - protein, 19 aa, Artificial Sequence
  Non-cyclic GFR-binding peptide
  MOD_RES (5)..(6): Xaa is C or S
SASPXXVPQDLSPISILFI

SEQ ID NO: 2049 - protein, 9 aa, Artificial Sequence
  Non-cyclic GFR-binding peptide
LEPLPVVYY

SEQ ID NO: 2050 - protein, 20 aa, Artificial Sequence
  Non-cyclic GFR-binding peptide
  MOD_RES (6)..(7): Xaa is C or S
YVPKPXXAPTKLSPISVLFI

SEQ ID NO: 2051 - protein, 16 aa, Artificial Sequence
  Non-cyclic GFR-binding peptide
  MOD_RES (2)..(3): Xaa is C or S
AXXVPTELSPISMLFI

SEQ ID NO: 2052 - protein, 20 aa, Artificial Sequence
  Non-cyclic GFR-binding peptide
  MOD_RES (6)..(7): Xaa is C or S
SIPKAXXVPTELSPISMLFI

SEQ ID NO: 2053 - protein, 10 aa, Artificial Sequence
  Non-cyclic GFR-binding peptide
DLEPLPIVYY

SEQ ID NO: 2054 - protein, 13 aa, Artificial Sequence
  Non-cyclic GFR-binding peptide
VPTELEPLTMLYY

SEQ ID NO: 2055 - protein, 11 aa, Artificial Sequence
  Non-cyclic GFR-binding peptide
TRLEPLPIVYY

SEQ ID NO: 2056 - protein, 19 aa, Artificial Sequence
  Non-cyclic GFR-binding peptide
  MOD_RES (5)..(6): Xaa is C or S
VPKPXXAPTKLEPLPVVYY

SEQ ID NO: 2057 - protein, 15 aa, Artificial Sequence
  Non-cyclic GFR-binding peptide
  MOD_RES (1)..(2): Xaa is C or S
XXVPTELEPLTMLYY

SEQ ID NO: 2058 - protein, 9 aa, Artificial Sequence
  Non-cyclic GFR-binding peptide
LSPISMLFI

SEQ ID NO: 2059 - protein, 15 aa, Artificial Sequence
  Non-cyclic GFR-binding peptide
  MOD_RES (1)..(2): Xaa is C or S
XXVSQDLSPISILFI

SEQ ID NO: 2060 - protein, 16 aa, Artificial Sequence
  Non-cyclic GFR-binding peptide
  MOD_RES (2)..(3): Xaa is C or S
PXXVPQDLEPLPIVYY

SEQ ID NO: 2061 - protein, 11 aa, Artificial Sequence
  Non-cyclic GFR-binding peptide
TQLEPLPVVYY

SEQ ID NO: 2062 - protein, 17 aa, Artificial Sequence
  Non-cyclic GFR-binding peptide
  MOD_RES (4)..(4): Xaa is C or S
KPTXAPTKLSPISVLFI

SEQ ID NO: 2063 - protein, 20 aa, Artificial Sequence
  Non-cyclic GFR-binding peptide
  MOD_RES (6)..(7): Xaa is C or S
ASASPXXVSQDLEPLPIVYY

SEQ ID NO: 2064 - protein, 20 aa, Artificial Sequence
  Non-cyclic GFR-binding peptide
  MOD_RES (6)..(7): Xaa is C or S
STPPTXXVPTRLSAISILYL

SEQ ID NO: 2065 - protein, 17 aa, Artificial Sequence
  Non-cyclic GFR-binding peptide
  MOD_RES (3)..(4): Xaa is C or S
KPXXAPTQLEPLPVVYY

SEQ ID NO: 2066 - protein, 14 aa, Artificial Sequence
  Non-cyclic GFR-binding peptide
  MOD_RES (1)..(1): Xaa is C or S
XAPTQLEPLPVVYY

SEQ ID NO: 2067 - protein, 17 aa, Artificial Sequence
  Non-cyclic GFR-binding peptide
  MOD_RES (4)..(4): Xaa is C or S
KPTXAPTKLEPLPVVYY

SEQ ID NO: 2068 - protein, 19 aa, Artificial Sequence
  Non-cyclic GFR-binding peptide
  MOD_RES (5)..(6): Xaa is C or S
IPKAXXVPTELSPISMLFI

SEQ ID NO: 2069 - protein, 10 aa, Artificial Sequence
  Non-cyclic GFR-binding peptide
RLEPLTILYY

SEQ ID NO: 2070 - protein, 16 aa, Artificial Sequence
  Non-cyclic GFR-binding peptide
  MOD_RES (3)..(3): Xaa is C or S
PTXAPTKLEPLPVVYY

SEQ ID NO: 2071 - protein, 19 aa, Artificial Sequence
  Non-cyclic GFR-binding peptide
  MOD_RES (5)..(6): Xaa is C or S
TPPTXXVPTRLSAISILYL

SEQ ID NO: 2072 - protein, 16 aa, Artificial Sequence
  Non-cyclic GFR-binding peptide
  MOD_RES (2)..(3): Xaa is C or S
PXXAPTKLEPLTVLYY

SEQ ID NO: 2073 - protein, 17 aa, Artificial Sequence
  Non-cyclic GFR-binding peptide
  MOD_RES (3)..(4): Xaa is C or S
SPXXVSQDLEPLPIVYY

SEQ ID NO: 2074 - protein, 19 aa, Artificial Sequence
  Non-cyclic GFR-binding peptide
  MOD_RES (5)..(6): Xaa is C or S
SAAPXXVPQALSPISILFI

SEQ ID NO: 2075 - protein, 14 aa, Artificial Sequence
  Non-cyclic GFR-binding peptide
  MOD_RES (1)..(1): Xaa is C or S
XVPTRLEPLPIVYY

SEQ ID NO: 2076 - protein, 20 aa, Artificial Sequence
  Non-cyclic GFR-binding peptide
  MOD_RES (6)..(7): Xaa is C or S
KIPKAXXVPTELEPLTMLYY

SEQ ID NO: 2077 - protein, 15 aa, Artificial Sequence
  Non-cyclic GFR-binding peptide
  MOD_RES (1)..(2): Xaa is C or S
XXAPTKLEPLPVVYY

SEQ ID NO: 2078 - protein, 15 aa, Artificial Sequence
  Non-cyclic GFR-binding peptide
  MOD_RES (2)..(2): Xaa is C or S
TXAPTKLSPISVLFI

SEQ ID NO: 2079 - protein, 13 aa, Artificial Sequence
  Non-cyclic GFR-binding peptide
VPQDLSPISILFI

SEQ ID NO: 2080 - protein, 13 aa, Artificial Sequence
  Non-cyclic GFR-binding peptide
APTKLEPLPVVYY

SEQ ID NO: 2081 - protein, 13 aa, Artificial Sequence
  Non-cyclic GFR-binding peptide
VPTELSPISMLFI

SEQ ID NO: 2082 - protein, 10 aa, Artificial Sequence
  Non-cyclic GFR-binding peptide
RLEPLPIVYY

SEQ ID NO: 2083 - protein, 20 aa, Artificial Sequence
  Non-cyclic GFR-binding peptide
  MOD_RES (6)..(7): Xaa is C or S
SIPKAXXVPTELEPLPMVYY

SEQ ID NO: 2084 - protein, 16 aa, Artificial Sequence
  Non-cyclic GFR-binding peptide
  MOD_RES (2)..(3): Xaa is C or S
TXXVPTRLEPLTILYY

SEQ ID NO: 2085 - protein, 12 aa, Artificial Sequence
  Non-cyclic GFR-binding peptide
PTRLSAISILYL

SEQ ID NO: 2086 - protein, 14 aa, Artificial Sequence
  Non-cyclic GFR-binding peptide
  MOD_RES (1)..(1): Xaa is C or S
XVPTRLEPLTILYY

SEQ ID NO: 2087 - protein, 14 aa, Artificial Sequence
  Non-cyclic GFR-binding peptide
  MOD_RES (1)..(1): Xaa is C or S
XAPTKLEPLTVLYY

SEQ ID NO: 2088 - protein, 16 aa, Artificial Sequence
  Non-cyclic GFR-binding peptide
  MOD_RES (3)..(3): Xaa is C or S
PTXAPTKLSPISVLFI

SEQ ID NO: 2089 - protein, 17 aa, Artificial Sequence
  Non-cyclic GFR-binding peptide
  MOD_RES (4)..(4): Xaa is C or S
KPTXAPTKLEPLTVLYY

SEQ ID NO: 2090 - protein, 14 aa, Artificial Sequence
  Non-cyclic GFR-binding peptide
  MOD_RES (1)..(1): Xaa is C or S
XVSQDLSPISILFI

SEQ ID NO: 2091 - protein, 19 aa, Artificial Sequence
  Non-cyclic GFR-binding peptide
  MOD_RES (6)..(6): Xaa is C or S
VTKPTXAPTKLEPLTVLYY

SEQ ID NO: 2092 - protein, 9 aa, Artificial Sequence
  Non-cyclic GFR-binding peptide
LSPISVLFI

SEQ ID NO: 2093 - protein, 15 aa, Artificial Sequence
  Non-cyclic GFR-binding peptide
  MOD_RES (2)..(2): Xaa is C or S
TXAPTKLEPLPVVYY

SEQ ID NO: 2094 - protein, 16 aa, Artificial Sequence
  Non-cyclic GFR-binding peptide
  MOD_RES (2)..(3): Xaa is C or S
AXXVPTELEPLTMLYY

SEQ ID NO: 2095 - protein, 11 aa, Artificial Sequence
  Non-cyclic GFR-binding peptide
QALSPISILFI

SEQ ID NO: 2096 - protein, 20 aa, Artificial Sequence
  Non-cyclic GFR-binding peptide
  MOD_RES (6)..(7): Xaa is C or S
ASASPXXVSQDLSPISILFI

SEQ ID NO: 2097 - protein, 15 aa, Artificial Sequence
  Non-cyclic GFR-binding peptide
  MOD_RES (1)..(2): Xaa is C or S
XXVPQDLEPLPIVYY

SEQ ID NO: 2098 - protein, 14 aa, Artificial Sequence
  Non-cyclic GFR-binding peptide
  MOD_RES (1)..(1): Xaa is C or S
XAPTQLEPLTVLYY

SEQ ID NO: 2099 - protein, 13 aa, Artificial Sequence
  Non-cyclic GFR-binding peptide
VSQDLSPISILFI

SEQ ID NO: 2100 - protein, 18 aa, Artificial Sequence
  Non-cyclic GFR-binding peptide
  MOD_RES (4)..(5): Xaa is C or S
ASPXXVPQDLSPISILFI

SEQ ID NO: 2101 - protein, 20 aa, Artificial Sequence
  Non-cyclic GFR-binding peptide
  MOD_RES (7)..(7): Xaa is C or S
HVTKPTXAPTKLEPLPVVYY

SEQ ID NO: 2102 - protein, 19 aa, Artificial Sequence
  Non-cyclic GFR-binding peptide
  MOD_RES (5)..(6): Xaa is C or S
IPKAXXVPTELEPLTMLYY

SEQ ID NO: 2103 - protein, 15 aa, Artificial Sequence
  Non-cyclic GFR-binding peptide
  MOD_RES (1)..(2): Xaa is C or S
XXVPQALSPISILFI

SEQ ID NO: 2104 - protein, 16 aa, Artificial Sequence
  Non-cyclic GFR-binding peptide
  MOD_RES (2)..(3): Xaa is C or S
PXXVPQDLSPISILFI

SEQ ID NO: 2105 - protein, 17 aa, Artificial Sequence
  Non-cyclic GFR-binding peptide
  MOD_RES (3)..(4): Xaa is C or S
KAXXVPTELEPLTMLYY

SEQ ID NO: 2106 - protein, 16 aa, Artificial Sequence
  Non-cyclic GFR-binding peptide
  MOD_RES (2)..(3): Xaa is C or S
PXXAPTKLSPISVLFI

SEQ ID NO: 2107 - protein, 17 aa, Artificial Sequence
  Non-cyclic GFR-binding peptide
  MOD_RES (3)..(4): Xaa is C or S
APXXVPQALEPLTILYY

SEQ ID NO: 2108 - protein, 10 aa, Artificial Sequence
  Non-cyclic GFR-binding peptide
QLEPLTVLYY

SEQ ID NO: 2109 - protein, 19 aa, Artificial Sequence
  Non-cyclic GFR-binding peptide
  MOD_RES (5)..(6): Xaa is C or S
SASPXXVPQDLEPLPIVYY

SEQ ID NO: 2110 - protein, 11 aa, Artificial Sequence
  Non-cyclic GFR-binding peptide
QALEPLTILYY

SEQ ID NO: 2111 - protein, 14 aa, Artificial Sequence
  Non-cyclic GFR-binding peptide
  MOD_RES (1)..(1): Xaa is C or S
XAPTQLSPISVLFI

SEQ ID NO: 2112 - protein, 19 aa, Artificial Sequence
  Non-cyclic GFR-binding peptide
  MOD_RES (5)..(6): Xaa is C or S
VPKPXXAPTQLSPISVLFI

SEQ ID NO: 2113 - protein, 12 aa, Artificial Sequence
  Non-cyclic GFR-binding peptide
PTRLNAISILYF

SEQ ID NO: 2114 - protein, 20 aa, Artificial Sequence
  Non-cyclic GFR-binding peptide
  MOD_RES (6)..(7): Xaa is C or S
TVPKPXXAPTQLSPISVLFI

SEQ ID NO: 2115 - protein, 9 aa, Artificial Sequence
  Non-cyclic GFR-binding peptide
LEPLPMVYY

SEQ ID NO: 2116 - protein, 14 aa, Artificial Sequence
  Non-cyclic GFR-binding peptide
  MOD_RES (1)..(1): Xaa is C or S
XVSQDLEPLPIVYY

SEQ ID NO: 2117 - protein, 13 aa, Artificial Sequence
  Non-cyclic GFR-binding peptide
VPTELEPLPMVYY

SEQ ID NO: 2118 - protein, 11 aa, Artificial Sequence
  Non-cyclic GFR-binding peptide
TQLSPISVLFI

SEQ ID NO: 2119 - protein, 18 aa, Artificial Sequence
  Non-cyclic GFR-binding peptide
  MOD_RES (4)..(5): Xaa is C or S
AAPXXVPQALSPISILFI

SEQ ID NO: 2120 - protein, 15 aa, Artificial Sequence
  Non-cyclic GFR-binding peptide
  MOD_RES (1)..(2): Xaa is C or S
XXVPTELEPLPMVYY

SEQ ID NO: 2121 - protein, 9 aa, Artificial Sequence
  Non-cyclic GFR-binding peptide
LEPLTVLYY

SEQ ID NO: 2122 - protein, 13 aa, Artificial Sequence
  Non-cyclic GFR-binding peptide
APTQLSPISVLFI

SEQ ID NO: 2123 - protein, 13 aa, Artificial Sequence
  Non-cyclic GFR-binding peptide
VSQDLEPLPIVYY

SEQ ID NO: 2124 - protein, 19 aa, Artificial Sequence
  Non-cyclic GFR-binding peptide
  MOD_RES (5)..(6): Xaa is C or S
VPKPXXAPTQLEPLTVLYY

SEQ ID NO: 2125 - protein, 14 aa, Artificial Sequence
  Non-cyclic GFR-binding peptide
  MOD_RES (1)..(1): Xaa is C or S
XVPTELEPLTMLYY

SEQ ID NO: 2126 - protein, 10 aa, Artificial Sequence
  Non-cyclic GFR-binding peptide
ALSPISILFI

SEQ ID NO: 2127 - protein, 15 aa, Artificial Sequence
  Non-cyclic GFR-binding peptide
  MOD_RES (1)..(2): Xaa is C or S
XXVPTRLEPLPIVYY

SEQ ID NO: 2128 - protein, 20 aa, Artificial Sequence
  Non-cyclic GFR-binding peptide
  MOD_RES (6)..(7): Xaa is C or S
YVPKPXXAPTKLEPLTVLYY

SEQ ID NO: 2129 - protein, 14 aa, Artificial Sequence
  Non-cyclic GFR-binding peptide
  MOD_RES (1)..(1): Xaa is C or S
XVPTELEPLPMVYY

SEQ ID NO: 2130 - protein, 17 aa, Artificial Sequence
  Non-cyclic GFR-binding peptide
  MOD_RES (3)..(4): Xaa is C or S
SPXXVPQDLEPLPIVYY

SEQ ID NO: 2131 - protein, 13 aa, Artificial Sequence
  Non-cyclic GFR-binding peptide
VPQALSPISILFI

SEQ ID NO: 2132 - protein, 16 aa, Artificial Sequence
  Non-cyclic GFR-binding peptide
  MOD_RES (2)..(3): Xaa is C or S
PXXVSQDLEPLPIVYY

SEQ ID NO: 2133 - protein, 20 aa, Artificial Sequence
  Non-cyclic GFR-binding peptide
  MOD_RES (6)..(7): Xaa is C or S
SIPKAXXVPTELEPLTMLYY

SEQ ID NO: 2134 - protein, 12 aa, Artificial Sequence
  Non-cyclic GFR-binding peptide
SQDLSPISILFI

SEQ ID NO: 2135 - protein, 16 aa, Artificial Sequence
  Non-cyclic GFR-binding peptide
  MOD_RES (2)..(3): Xaa is C or S
TXXVPTRLNAISILYF

SEQ ID NO: 2136 - protein, 9 aa, Artificial Sequence
  Non-cyclic GFR-binding peptide
LEPLTMLYY

SEQ ID NO: 2137 - protein, 10 aa, Artificial Sequence
  Non-cyclic GFR-binding peptide
KLEPLTVLYY

SEQ ID NO: 2138 - protein, 15 aa, Artificial Sequence
  Non-cyclic GFR-binding peptide
  MOD_RES (1)..(2): Xaa is C or S
XXVSQDLEPLPIVYY

SEQ ID NO: 2139 - protein, 12 aa, Artificial Sequence
  Non-cyclic GFR-binding peptide
PTELEPLTMLYY

SEQ ID NO: 2140 - protein, 20 aa, Artificial Sequence
  Non-cyclic GFR-binding peptide
  MOD_RES (6)..(7): Xaa is C or S
TVPKPXXAPTQLEPLTVLYY

SEQ ID NO: 2141 - protein, 14 aa, Artificial Sequence
  Non-cyclic GFR-binding peptide
  MOD_RES (1)..(1): Xaa is C or S
XAPTKLSPISVLFI

SEQ ID NO: 2142 - protein, 10 aa, Artificial Sequence
  Non-cyclic GFR-binding peptide
RLNAISILYF

SEQ ID NO: 2143 - protein, 12 aa, Artificial Sequence
  Non-cyclic GFR-binding peptide
PTKLEPLPVVYY

SEQ ID NO: 2144 - protein, 15 aa, Artificial Sequence
  Non-cyclic GFR-binding peptide
  MOD_RES (1)..(2): Xaa is C or S
XXVPTRLEPLTILYY

SEQ ID NO: 2145 - protein, 16 aa, Artificial Sequence
  Non-cyclic GFR-binding peptide
  MOD_RES (2)..(3): Xaa is C or S
PXXAPTQLSPISVLFI

SEQ ID NO: 2146 - protein, 10 aa, Artificial Sequence
  Non-cyclic GFR-binding peptide
DLSPISILFI

SEQ ID NO: 2147 - protein, 15 aa, Artificial Sequence
  Non-cyclic GFR-binding peptide
  MOD_RES (1)..(2): Xaa is C or S
XXVPQDLSPISILFI

SEQ ID NO: 2148 - protein, 19 aa, Artificial Sequence
  Non-cyclic GFR-binding peptide
  MOD_RES (5)..(6): Xaa is C or S
VPKPXXAPTKLSPISVLFI

SEQ ID NO: 2149 - protein, 19 aa, Artificial Sequence
  Non-cyclic GFR-binding peptide
  MOD_RES (5)..(6): Xaa is C or S
SAAPXXVPQALEPLTILYY

SEQ ID NO: 2150 - protein, 14 aa, Artificial Sequence
  Non-cyclic GFR-binding peptide
  MOD_RES (1)..(1): Xaa is C or S
XVPQDLSPISILFI

SEQ ID NO: 2151 - protein, 10 aa, Artificial Sequence
  Non-cyclic GFR-binding peptide
KLEPLPVVYY

SEQ ID NO: 2152 - protein, 19 aa, Artificial Sequence
  Non-cyclic GFR-binding peptide
  MOD_RES (5)..(6): Xaa is C or S
TPPTXXVPTRLEPLPIVYY

SEQ ID NO: 2153 - protein, 17 aa, Artificial Sequence
  Non-cyclic GFR-binding peptide
  MOD_RES (3)..(4): Xaa is C or S
PTXXVPTRLEPLTILYY

SEQ ID NO: 2154 - protein, 10 aa, Artificial Sequence
  Non-cyclic GFR-binding peptide
QLEPLPVVYY

SEQ ID NO: 2155 - protein, 15 aa, Artificial Sequence
  Non-cyclic GFR-binding peptide
  MOD_RES (1)..(2): Xaa is C or S
XXAPTKLSPISVLFI

SEQ ID NO: 2156 - protein, 12 aa, Artificial Sequence
  Non-cyclic GFR-binding peptide
PTELEPLPMVYY

SEQ ID NO: 2157 - protein, 18 aa, Artificial Sequence
  Non-cyclic GFR-binding peptide
  MOD_RES (4)..(5): Xaa is C or S
PPTXXVPTRLEPLPIVYY

SEQ ID NO: 2158 - protein, 18 aa, Artificial Sequence
  Non-cyclic GFR-binding peptide
  MOD_RES (4)..(5): Xaa is C or S
PKPXXAPTKLSPISVLFI

SEQ ID NO: 2159 - protein, 18 aa, Artificial Sequence
  Non-cyclic GFR-binding peptide
  MOD_RES (4)..(5): Xaa is C or S
PKPXXAPTQLSPISVLFI

SEQ ID NO: 2160 - protein, 15 aa, Artificial Sequence
  Non-cyclic GFR-binding peptide
  MOD_RES (1)..(2): Xaa is C or S
XXAPTQLSPISVLFI

SEQ ID NO: 2161 - protein, 19 aa, Artificial Sequence
  Non-cyclic GFR-binding peptide
  MOD_RES (6)..(6): Xaa is C or S
VTKPTXAPTKLSPISVLFI

SEQ ID NO: 2162 - protein, 16 aa, Artificial Sequence
  Non-cyclic GFR-binding peptide
  MOD_RES (2)..(3): Xaa is C or S
TXXVPTRLSAISILYL

SEQ ID NO: 2163 - protein, 12 aa, Artificial Sequence
  Non-cyclic GFR-binding peptide
PQALSPISILFI

SEQ ID NO: 2164 - protein, 18 aa, Artificial Sequence
  Non-cyclic GFR-binding peptide
  MOD_RES (5)..(5): Xaa is C or S
TKPTXAPTKLSPISVLFI

SEQ ID NO: 2165 - protein, 19 aa, Artificial Sequence
  Non-cyclic GFR-binding peptide
  MOD_RES (5)..(6): Xaa is C or S
IPKAXXVPTELEPLPMVYY

SEQ ID NO: 2166 - protein, 12 aa, Artificial Sequence
  Non-cyclic GFR-binding peptide
PTKLEPLTVLYY

SEQ ID NO: 2167 - protein, 13 aa, Artificial Sequence
  Non-cyclic GFR-binding peptide
VPTRLEPLPIVYY

SEQ ID NO: 2168 - protein, 12 aa, Artificial Sequence
  Non-cyclic GFR-binding peptide
PQDLSPISILFI

SEQ ID NO: 2169 - protein, 20 aa, Artificial Sequence
  Non-cyclic GFR-binding peptide
  MOD_RES (6)..(7): Xaa is C or S
KIPKAXXVPTELSPISMLFI

SEQ ID NO: 2170 - protein, 15 aa, Artificial Sequence
  Non-cyclic GFR-binding peptide
  MOD_RES (2)..(2): Xaa is C or S
TXAPTKLEPLTVLYY

SEQ ID NO: 2171 - protein, 10 aa, Artificial Sequence
  Non-cyclic GFR-binding peptide
ELEPLPMVYY

SEQ ID NO: 2172 - protein, 19 aa, Artificial Sequence
  Non-cyclic GFR-binding peptide
  MOD_RES (5)..(6): Xaa is C or S
SASPXXVSQDLEPLPIVYY

SEQ ID NO: 2173 - protein, 11 aa, Artificial Sequence
  Non-cyclic GFR-binding peptide
TRLEPLTILYY

SEQ ID NO: 2174 - protein, 17 aa, Artificial Sequence
  Non-cyclic GFR-binding peptide
  MOD_RES (3)..(4): Xaa is C or S
KPXXAPTQLSPISVLFI

SEQ ID NO: 2175 - protein, 18 aa, Artificial Sequence
  Non-cyclic GFR-binding peptide
  MOD_RES (4)..(5): Xaa is C or S
ASPXXVSQDLSPISILFI

SEQ ID NO: 2176 - protein, 20 aa, Artificial Sequence
  Non-cyclic GFR-binding peptide
  MOD_RES (6)..(7): Xaa is C or S
YVPKPXXAPTKLEPLPVVYY

SEQ ID NO: 2177 - protein, 11 aa, Artificial Sequence
  Non-cyclic GFR-binding peptide
TELSPISMLFI

SEQ ID NO: 2178 - protein, 20 aa, Artificial Sequence
  Non-cyclic GFR-binding peptide
  MOD_RES (6)..(7): Xaa is C or S
STPPTXXVPTRLEPLTILYY

SEQ ID NO: 2179 - protein, 12 aa, Artificial Sequence
  Non-cyclic GFR-binding peptide
PTQLEPLPVVYY

SEQ ID NO: 2180 - protein, 18 aa, Artificial Sequence
  Non-cyclic GFR-binding peptide
  MOD_RES (4)..(5): Xaa is C or S
PKPXXAPTKLEPLTVLYY

SEQ ID NO: 2181 - protein, 18 aa, Artificial Sequence
  Non-cyclic GFR-binding peptide
  MOD_RES (4)..(5): Xaa is C or S
PKAXXVPTELEPLPMVYY

SEQ ID NO: 2182 - protein, 18 aa, Artificial Sequence
  Non-cyclic GFR-binding peptide
  MOD_RES (4)..(5): Xaa is C or S
ASPXXVSQDLEPLPIVYY

SEQ ID NO: 2183 - protein, 10 aa, Artificial Sequence
  Non-cyclic GFR-binding peptide
KLSPISVLFI

SEQ ID NO: 2184 - protein, 10 aa, Artificial Sequence
  Non-cyclic GFR-binding peptide
RLSAISILYL

SEQ ID NO: 2185 - protein, 20 aa, Artificial Sequence
  Non-cyclic GFR-binding peptide
  MOD_RES (6)..(7): Xaa is C or S
ASAAPXXVPQALSPISILFI

SEQ ID NO: 2186 - protein, 10 aa, Artificial Sequence
  Non-cyclic GFR-binding peptide
ELSPISMLFI

SEQ ID NO: 2187 - protein, 13 aa, Artificial Sequence
  Non-cyclic GFR-binding peptide
VPQALEPLTILYY

SEQ ID NO: 2188 - protein, 17 aa, Artificial Sequence
  Non-cyclic GFR-binding peptide
  MOD_RES (3)..(4): Xaa is C or S
PTXXVPTRLEPLPIVYY

SEQ ID NO: 2189 - protein, 13 aa, Artificial Sequence
  Non-cyclic GFR-binding peptide
APTQLEPLTVLYY

SEQ ID NO: 2190 - protein, 18 aa, Artificial Sequence
  Non-cyclic GFR-binding peptide
  MOD_RES (4)..(5): Xaa is C or S
PPTXXVPTRLEPLTILYY

SEQ ID NO: 2191 - protein, 12 aa, Artificial Sequence
  Non-cyclic GFR-binding peptide
PTQLEPLTVLYY

SEQ ID NO: 2192 - protein, 18 aa, Artificial Sequence
  Non-cyclic GFR-binding peptide
  MOD_RES (4)..(5): Xaa is C or S
PKPXXAPTKLEPLPVVYY

SEQ ID NO: 2193 - protein, 11 aa, Artificial Sequence
  Non-cyclic GFR-binding peptide
TRLSAISILYL

SEQ ID NO: 2194 - protein, 11 aa, Artificial Sequence
  Non-cyclic GFR-binding peptide
TKLSPISVLFI

SEQ ID NO: 2195 - protein, 13 aa, Artificial Sequence
  Non-cyclic GFR-binding peptide
VPTRLEPLTILYY

SEQ ID NO: 2196 - protein, 11 aa, Artificial Sequence
  Non-cyclic GFR-binding peptide
TELEPLPMVYY

SEQ ID NO: 2197 - protein, 20 aa, Artificial Sequence
  Non-cyclic GFR-binding peptide
  MOD_RES (6)..(7): Xaa is C or S
ASASPXXVPQDLSPISILFI

SEQ ID NO: 2198 - protein, 17 aa, Artificial Sequence
  Non-cyclic GFR-binding peptide
  MOD_RES (3)..(4): Xaa is C or S
KPXXAPTKLSPISVLFI

SEQ ID NO: 2199 - protein, 12 aa, Artificial Sequence
  Non-cyclic GFR-binding peptide
PTRLEPLPIVYY

SEQ ID NO: 2200 - protein, 16 aa, Artificial Sequence
  Non-cyclic GFR-binding peptide
  MOD_RES (2)..(3): Xaa is C or S
PXXVPQALEPLTILYY

SEQ ID NO: 2201 - protein, 11 aa, Artificial Sequence
  Non-cyclic GFR-binding peptide
QDLEPLPIVYY

SEQ ID NO: 2202 - protein, 18 aa, Artificial Sequence
  Non-cyclic GFR-binding peptide
  MOD_RES (4)..(5): Xaa is C or S
PKAXXVPTELEPLTMLYY

SEQ ID NO: 2203 - protein, 17 aa, Artificial Sequence
  Non-cyclic GFR-binding peptide
  MOD_RES (3)..(4): Xaa is C or S
KAXXVPTELSPISMLFI

SEQ ID NO: 2204 - protein, 10 aa, Artificial Sequence
  Non-cyclic GFR-binding peptide
ELEPLTMLYY

SEQ ID NO: 2205 - protein, 17 aa, Artificial Sequence
  Non-cyclic GFR-binding peptide
  MOD_RES (3)..(4): Xaa is C or S
APXXVPQALSPISILFI

SEQ ID NO: 2206 - protein, 20 aa, Artificial Sequence
  Non-cyclic GFR-binding peptide
  MOD_RES (6)..(7): Xaa is C or S
ASASPXXVPQDLEPLPIVYY

SEQ ID NO: 2207 - protein, 17 aa, Artificial Sequence
  Non-cyclic GFR-binding peptide
  MOD_RES (3)..(4): Xaa is C or S
KPXXAPTKLEPLPVVYY

SEQ ID NO: 2208 - protein, 12 aa, Artificial Sequence
  Non-cyclic GFR-binding peptide
SQDLEPLPIVYY

SEQ ID NO: 2209 - protein, 14 aa, Artificial Sequence
  Non-cyclic GFR-binding peptide
  MOD_RES (1)..(1): Xaa is C or S
XVPTRLNAISILYF

SEQ ID NO: 2210 - protein, 12 aa, Artificial Sequence
  Non-cyclic GFR-binding peptide
PTRLEPLTILYY

SEQ ID NO: 2211 - protein, 14 aa, Artificial Sequence
  Non-cyclic GFR-binding peptide
  MOD_RES (1)..(1): Xaa is C or S
XVPTRLSAISILYL

SEQ ID NO: 2212 - protein, 11 aa, Artificial Sequence
  Non-cyclic GFR-binding peptide
TELEPLTMLYY

SEQ ID NO: 2213 - protein, 19 aa, Artificial Sequence
  Non-cyclic GFR-binding peptide
  MOD_RES (5)..(6): Xaa is C or S
TPPTXXVPTRLEPLTILYY

SEQ ID NO: 2214 - protein, 20 aa, Artificial Sequence
  Non-cyclic GFR-binding peptide
  MOD_RES (6)..(7): Xaa is C or S
STPPTXXVPTRLEPLPIVYY

SEQ ID NO: 2215 - protein, 11 aa, Artificial Sequence
  Non-cyclic GFR-binding peptide
QDLSPISILFI

SEQ ID NO: 2216 - protein, 18 aa, Artificial Sequence
  Non-cyclic GFR-binding peptide
  MOD_RES (4)..(5): Xaa is C or S
PKAXXVPTELSPISMLFI

SEQ ID NO: 2217 - protein, 17 aa, Artificial Sequence
  Non-cyclic GFR-binding peptide
  MOD_RES (3)..(4): Xaa is C or S
KAXXVPTELEPLPMVYY

SEQ ID NO: 2218 - protein, 18 aa, Artificial Sequence
  Non-cyclic GFR-binding peptide
  MOD_RES (4)..(5): Xaa is C or S
PPTXXVPTRLNAISILYF

SEQ ID NO: 2219 - protein, 11 aa, Artificial Sequence
  Non-cyclic GFR-binding peptide
TKLEPLTVLYY

SEQ ID NO: 2220 - protein, 15 aa, Artificial Sequence
  Non-cyclic GFR-binding peptide
  MOD_RES (1)..(2): Xaa is C or S
XXAPTQLEPLPVVYY

SEQ ID NO: 2221 - protein, 17 aa, Artificial Sequence
  Non-cyclic GFR-binding peptide
  MOD_RES (3)..(4): Xaa is C or S
KPXXAPTKLEPLTVLYY

SEQ ID NO: 2222 - protein, 19 aa, Artificial Sequence
  Non-cyclic GFR-binding peptide
  MOD_RES (5)..(6): Xaa is C or S
SASPXXVSQDLSPISILFI

SEQ ID NO: 2223 - protein, 20 aa, Artificial Sequence
  Non-cyclic GFR-binding peptide
  MOD_RES (6)..(7): Xaa is C or S
ASAAPXXVPQALEPLTILYY

SEQ ID NO: 2224 - protein, 10 aa, Artificial Sequence
  Non-cyclic GFR-binding peptide
QLSPISVLFI

SEQ ID NO: 2225 - protein, 14 aa, Artificial Sequence
  Non-cyclic GFR-binding peptide
  MOD_RES (1)..(1): Xaa is C or S
XVPQDLEPLPIVYY

SEQ ID NO: 2226 - protein, 15 aa, Artificial Sequence
  Non-cyclic GFR-binding peptide
  MOD_RES (1)..(2): Xaa is C or S
XXVPTELSPISMLFI

SEQ ID NO: 2227 - protein, 18 aa, Artificial Sequence
  Non-cyclic GFR-binding peptide
  MOD_RES (4)..(5): Xaa is C or S
PKPXXAPTQLEPLTVLYY

SEQ ID NO: 2228 - protein, 20 aa, Artificial Sequence
  Non-cyclic GFR-binding peptide
  MOD_RES (6)..(7): Xaa is C or S
TVPKPXXAPTQLEPLPVVYY

SEQ ID NO: 2229 - protein, 16 aa, Artificial Sequence
  Non-cyclic GFR-binding peptide
  MOD_RES (2)..(3): Xaa is C or S
PXXAPTQLEPLPVVYY

SEQ ID NO: 2230 - protein, 17 aa, Artificial Sequence
  Non-cyclic GFR-binding peptide
  MOD_RES (3)..(4): Xaa is C or S
PTXXVPTRLSAISILYL

SEQ ID NO: 2231 - protein, 19 aa, Artificial Sequence
  Non-cyclic GFR-binding peptide
  MOD_RES (5)..(6): Xaa is C or S
TPPTXXVPTRLNAISILYF

SEQ ID NO: 2232 - protein, 18 aa, Artificial Sequence
  Non-cyclic GFR-binding peptide
  MOD_RES (4)..(5): Xaa is C or S
AAPXXVPQALEPLTILYY

SEQ ID NO: 2233 - protein, 11 aa, Artificial Sequence
  Non-cyclic GFR-binding peptide
TKLEPLPVVYY

SEQ ID NO: 2234 - protein, 19 aa, Artificial Sequence
  Non-cyclic GFR-binding peptide
  MOD_RES (5)..(6): Xaa is C or S
VPKPXXAPTQLEPLPVVYY

SEQ ID NO: 2235 - protein, 20 aa, Artificial Sequence
  Non-cyclic GFR-binding peptide
  MOD_RES (6)..(7): Xaa is C or S
STPPTXXVPTRLNAISILYF

SEQ ID NO: 2236 - protein, 15 aa, Artificial Sequence
  Non-cyclic GFR-binding peptide
  MOD_RES (1)..(2): Xaa is C or S
XXAPTQLEPLTVLYY

SEQ ID NO: 2237 - protein, 13 aa, Artificial Sequence
  Non-cyclic GFR-binding peptide
VPTRLNAISILYF

SEQ ID NO: 2238 - protein, 17 aa, Artificial Sequence
  Non-cyclic GFR-binding peptide
  MOD_RES (3)..(4): Xaa is C or S
SPXXVPQDLSPISILFI

SEQ ID NO: 2239 - protein, 16 aa, Artificial Sequence
  Non-cyclic GFR-binding peptide
  MOD_RES (2)..(3): Xaa is C or S
PXXVPQALSPISILFI

SEQ ID NO: 2240 - protein, 18 aa, Artificial Sequence
  Non-cyclic GFR-binding peptide
  MOD_RES (4)..(5): Xaa is C or S
ASPXXVPQDLEPLPIVYY

SEQ ID NO: 2241 - protein, 12 aa, Artificial Sequence
  Non-cyclic GFR-binding peptide
PTQLSPISVLFI

SEQ ID NO: 2242 - protein, 15 aa, Artificial Sequence
  Non-cyclic GFR-binding peptide
  MOD_RES (1)..(2): Xaa is C or S
XXVPTRLSAISILYL

SEQ ID NO: 2243 - protein, 12 aa, Artificial Sequence
  Non-cyclic GFR-binding peptide
PTKLSPISVLFI

SEQ ID NO: 2244 - protein, 12 aa, Artificial Sequence
  Non-cyclic GFR-binding peptide
PQALEPLTILYY

SEQ ID NO: 2245 - protein, 15 aa, Artificial Sequence
  Non-cyclic GFR-binding peptide
  MOD_RES (1)..(2): Xaa is C or S
XXVPTRLNAISILYF

SEQ ID NO: 2246 - protein, 18 aa, Artificial Sequence
  Non-cyclic GFR-binding peptide
  MOD_RES (5)..(5): Xaa is C or S
TKPTXAPTKLEPLPVVYY

SEQ ID NO: 2247 - protein, 11 aa, Artificial Sequence
  Non-cyclic GFR-binding peptide
TRLNAISILYF

SEQ ID NO: 2248 - protein, 15 aa, Artificial Sequence
  Non-cyclic GFR-binding peptide
  MOD_RES (1)..(2): Xaa is C or S
XXVPQALEPLTILYY

SEQ ID NO: 2249 - protein, 13 aa, Artificial Sequence
  Non-cyclic GFR-binding peptide
APTKLEPLTVLYY

SEQ ID NO: 2250 - protein, 20 aa, Artificial Sequence
  Non-cyclic GFR-binding peptide
  MOD_RES (6)..(7): Xaa is C or S
KIPKAXXVPTELEPLPMVYY

SEQ ID NO: 2251 - protein, 10 aa, Artificial Sequence
  Non-cyclic GFR-binding peptide
ALEPLTILYY

SEQ ID NO: 2252 - protein, 14 aa, Artificial Sequence
  Non-cyclic GFR-binding peptide
  MOD_RES (1)..(1): Xaa is C or S
XVPQALEPLTILYY

SEQ ID NO: 2253 - protein, 17 aa, Artificial Sequence
  Non-cyclic GFR-binding peptide
  MOD_RES (3)..(4): Xaa is C or S
SPXXVSQDLSPISILFI

SEQ ID NO: 2254 - protein, 15 aa, Artificial Sequence
  Non-cyclic GFR-binding peptide
  MOD_RES (1)..(2): Xaa is C or S
XXAPTKLEPLTVLYY

SEQ ID NO: 2255 - protein, 20 aa, Artificial Sequence
  Non-cyclic GFR-binding peptide
  MOD_RES (7)..(7): Xaa is C or S
HVTKPTXAPTKLEPLTVLYY

SEQ ID NO: 2256 - protein, 12 aa, Artificial Sequence
  Non-cyclic GFR-binding peptide
PQDLEPLPIVYY

SEQ ID NO: 2257 - protein, 14 aa, Artificial Sequence
  Non-cyclic GFR-binding peptide
  MOD_RES (1)..(1): Xaa is C or S
XAPTKLEPLPVVYY

SEQ ID NO: 2258 - protein, 16 aa, Artificial Sequence
  Non-cyclic GFR-binding peptide
  MOD_RES (2)..(3): Xaa is C or S
TXXVPTRLEPLPIVYY

SEQ ID NO: 2259 - protein, 18 aa, Artificial Sequence
  Non-cyclic GFR-binding peptide
  MOD_RES (4)..(5): Xaa is C or S
PKPXXAPTQLEPLPVVYY

SEQ ID NO: 2260 - protein, 16 aa, Artificial Sequence
  Non-cyclic GFR-binding peptide
  MOD_RES (2)..(3): Xaa is C or S
PXXAPTQLEPLTVLYY

SEQ ID NO: 2261 - protein, 17 aa, Artificial Sequence
  Non-cyclic GFR-binding peptide
  MOD_RES (3)..(4): Xaa is C or S
PTXXVPTRLNAISILYF

SEQ ID NO: 2262 - protein, 19 aa, Artificial Sequence
  Non-cyclic GFR-binding peptide
  MOD_RES (6)..(6): Xaa is C or S
VTKPTXAPTKLEPLPVVYY

SEQ ID NO: 2263 - protein, 16 aa, Artificial Sequence
  Non-cyclic GFR-binding peptide
  MOD_RES (2)..(3): Xaa is C or S
PXXVSQDLSPISILFI

SEQ ID NO: 2264 - protein, 13 aa, Artificial Sequence
  Non-cyclic GFR-binding peptide
APTQLEPLPVVYY

SEQ ID NO: 2265 - protein, 16 aa, Artificial Sequence
  Non-cyclic GFR-binding peptide
  MOD_RES (2)..(3): Xaa is C or S
AXXVPTELEPLPMVYY

SEQ ID NO: 2266 - protein, 12 aa, Artificial Sequence
  Non-cyclic GFR-binding peptide
PTELSPISMLFI

SEQ ID NO: 2267 - protein, 18 aa, Artificial Sequence
  Non-cyclic GFR-binding peptide
  MOD_RES (4)..(5): Xaa is C or S
PPTXXVPTRLSAISILYL

SEQ ID NO: 2268 - protein, 14 aa, Artificial Sequence
  Non-cyclic GFR-binding peptide
  MOD_RES (1)..(1): Xaa is C or S
XVPTELSPISMLFI

SEQ ID NO: 2269 - protein, 13 aa, Artificial Sequence
  Non-cyclic GFR-binding peptide
VKAVKVSRLQVQT

SEQ ID NO: 2270 - protein, 18 aa, Artificial Sequence
  Non-cyclic GFR-binding peptide
  MOD_RES (16)..(16): Xaa is C or S
MIQVTINSLQVQTPRXQV

SEQ ID NO: 2271 - protein, 13 aa, Artificial Sequence
  Non-cyclic GFR-binding peptide
IKRMQVPRQGTPV

SEQ ID NO: 2272 - protein, 11 aa, Artificial Sequence
  Non-cyclic GFR-binding peptide
IKRMQVPREET

SEQ ID NO: 2273 - protein, 14 aa, Artificial Sequence
  Non-cyclic GFR-binding peptide
IKRVQVPRHHVRSP

SEQ ID NO: 2274 - protein, 12 aa, Artificial Sequence
  Non-cyclic GFR-binding peptide
MIQVTINSHHVR

SEQ ID NO: 2275 - protein, 19 aa, Artificial Sequence
  Non-cyclic GFR-binding peptide
  MOD_RES (14)..(14): Xaa is C or S
IKRMQVPRQGTPVXELGED

SEQ ID NO: 2276 - protein, 14 aa, Artificial Sequence
  Non-cyclic GFR-binding peptide
  MOD_RES (14)..(14): Xaa is C or S
VKAMKVSREETPVX

SEQ ID NO: 2277 - protein, 10 aa, Artificial Sequence
  Non-cyclic GFR-binding peptide
MIQVTINSLQ

SEQ ID NO: 2278 - protein, 15 aa, Artificial Sequence
  Non-cyclic GFR-binding peptide
MIQVTINSLQVQTPR

SEQ ID NO: 2279 - protein, 15 aa, Artificial Sequence
  Non-cyclic GFR-binding peptide
VKAVKVSRLQVQTPR

SEQ ID NO: 2280 - protein, 9 aa, Artificial Sequence
  Non-cyclic GFR-binding peptide
IKRMQVPRQ

SEQ ID NO: 2281 - protein, 20 aa, Artificial Sequence
  Non-cyclic GFR-binding peptide
  MOD_RES (16)..(16): Xaa is C or S
MIQVTINSLQVQTPRXQVNR

SEQ ID NO: 2282 - protein, 15 aa, Artificial Sequence
  Non-cyclic GFR-binding peptide
IKRVQVPRHHVRSPQ

SEQ ID NO: 2283 - protein, 14 aa, Artificial Sequence
  Non-cyclic GFR-binding peptide
  MOD_RES (14)..(14): Xaa is C or S
IKRMQVPRQGTPVX

SEQ ID NO: 2284 - protein, 16 aa, Artificial Sequence
  Non-cyclic GFR-binding peptide
  MOD_RES (14)..(14): Xaa is C or S
VKAMKVSRQGTPVXEL

SEQ ID NO: 2285 - protein, 19 aa, Artificial Sequence
  Non-cyclic GFR-binding peptide
  MOD_RES (16)..(16): Xaa is C or S
IKRVQVPRHHVRSPQXKVS

SEQ ID NO: 2286 - protein, 11 aa, Artificial Sequence
  Non-cyclic GFR-binding peptide
VKAMKVSRQGT

SEQ ID NO: 2287 - protein, 17 aa, Artificial Sequence
  Non-cyclic GFR-binding peptide
  MOD_RES (14)..(14): Xaa is C or S
IKRMQVPREETPVXELG

SEQ ID NO: 2288 - protein, 20 aa, Artificial Sequence
  Non-cyclic GFR-binding peptide
  MOD_RES (16)..(16): Xaa is C or S
VKAVKVSRLQVQTPRXQVNR

SEQ ID NO: 2289 - protein, 19 aa, Artificial Sequence
  Non-cyclic GFR-binding peptide
  MOD_RES (14)..(14): Xaa is C or S
VKAMKVSREETPVXELGED

SEQ ID NO: 2290 - protein, 13 aa, Artificial Sequence
  Non-cyclic GFR-binding peptide
MIQVTINSLQVQT

SEQ ID NO: 2291 - protein, 13 aa, Artificial Sequence
  Non-cyclic GFR-binding peptide
VKAMKVSREETPV

SEQ ID NO: 2292 - protein, 11 aa, Artificial Sequence
  Non-cyclic GFR-binding peptide
MIQVTINSLQV

SEQ ID NO: 2293 - protein, 20 aa, Artificial Sequence
  Non-cyclic GFR-binding peptide
  MOD_RES (14)..(14): Xaa is C or S
VKAMKVSREETPVXELGEDN

SEQ ID NO: 2294 - protein, 16 aa, Artificial Sequence
  Non-cyclic GFR-binding peptide
  MOD_RES (14)..(14): Xaa is C or S
IKRMQVPREETPVXEL

SEQ ID NO: 2295 - protein, 17 aa, Artificial Sequence
  Non-cyclic GFR-binding peptide
  MOD_RES (16)..(16): Xaa is C or S
MIQVTINSHHVRSPQXK

SEQ ID NO: 2296 - protein, 18 aa, Artificial Sequence
  Non-cyclic GFR-binding peptide
  MOD_RES (16)..(16): Xaa is C or S
VKAVKVSRLQVQTPRXQV

SEQ ID NO: 2297 - protein, 16 aa, Artificial Sequence
  Non-cyclic GFR-binding peptide
  MOD_RES (16)..(16): Xaa is C or S
MIQVTINSLQVQTPRX

SEQ ID NO: 2298 - protein, 14 aa, Artificial Sequence
  Non-cyclic GFR-binding peptide
MIQVTINSHHVRSP

SEQ ID NO: 2299 - protein, 12 aa, Artificial Sequence
  Non-cyclic GFR-binding peptide
IKRVQVPRHHVR

SEQ ID NO: 2300 - protein, 10 aa, Artificial Sequence
  Non-cyclic GFR-binding peptide
IKRVQVPRHH

SEQ ID NO: 2301 - protein, 15 aa, Artificial Sequence
  Non-cyclic GFR-binding peptide
  MOD_RES (14)..(14): Xaa is C or S
VKAMKVSRQGTPVXE

SEQ ID NO: 2302 - protein, 10 aa, Artificial Sequence
  Non-cyclic GFR-binding peptide
VKAMKVSRQG

SEQ ID NO: 2303 - protein, 12 aa, Artificial Sequence
  Non-cyclic GFR-binding peptide
IKRMQVPREETP

SEQ ID NO: 2304 - protein, 20 aa, Artificial Sequence
  Non-cyclic GFR-binding peptide
  MOD_RES (16)..(16): Xaa is C or S
IKRVQVPRHHVRSPQXKVSS

SEQ ID NO: 2305 - protein, 15 aa, Artificial Sequence
  Non-cyclic GFR-binding peptide
  MOD_RES (14)..(14): Xaa is C or S
VKAMKVSREETPVXE

SEQ ID NO: 2306 - protein, 10 aa, Artificial Sequence
  Non-cyclic GFR-binding peptide
VKAMKVSREE

SEQ ID NO: 2307 - protein, 19 aa, Artificial Sequence
  Non-cyclic GFR-binding peptide
  MOD_RES (14)..(14): Xaa is C or S
VKAMKVSRQGTPVXELGED

SEQ ID NO: 2308 - protein, 14 aa, Artificial Sequence
  Non-cyclic GFR-binding peptide
  MOD_RES (14)..(14): Xaa is C or S
IKRMQVPREETPVX

SEQ ID NO: 2309 - protein, 13 aa, Artificial Sequence
  Non-cyclic GFR-binding peptide
MIQVTINSHHVRS

SEQ ID NO: 2310 - protein, 15 aa, Artificial Sequence
  Non-cyclic GFR-binding peptide
MIQVTINSHHVRSPQ

SEQ ID NO: 2311 - protein, 12 aa, Artificial Sequence
  Non-cyclic GFR-binding peptide
VKAVKVSRLQVQ

SEQ ID NO: 2312 - protein, 9 aa, Artificial Sequence
  Non-cyclic GFR-binding peptide
VKAMKVSRQ

SEQ ID NO: 2313 - protein, 9 aa, Artificial Sequence
  Non-cyclic GFR-binding peptide
VKAVKVSRL

SEQ ID NO: 2314 - protein, 10 aa, Artificial Sequence
  Non-cyclic GFR-binding peptide
VKAVKVSRLQ

SEQ ID NO: 2315 - protein, 20 aa, Artificial Sequence
  Non-cyclic GFR-binding peptide
  MOD_RES (16)..(16): Xaa is C or S
MIQVTINSHHVRSPQXKVSS

SEQ ID NO: 2316 - protein, 19 aa, Artificial Sequence
  Non-cyclic GFR-binding peptide
  MOD_RES (16)..(16): Xaa is C or S
VKAVKVSRLQVQTPRXQVN

SEQ ID NO: 2317 - protein, 14 aa, Artificial Sequence
  Non-cyclic GFR-binding peptide
  MOD_RES (14)..(14): Xaa is C or S
VKAMKVSRQGTPVX

SEQ ID NO: 2318 - protein, 19 aa, Artificial Sequence
  Non-cyclic GFR-binding peptide
  MOD_RES (14)..(14): Xaa is C or S
IKRMQVPREETPVXELGED

SEQ ID NO: 2319 - protein, 11 aa, Artificial Sequence
  Non-cyclic GFR-binding peptide
MIQVTINSHHV

SEQ ID NO: 2320 - protein, 11 aa, Artificial Sequence
  Non-cyclic GFR-binding peptide
IKRMQVPRQGT

SEQ ID NO: 2321 - protein, 16 aa, Artificial Sequence
  Non-cyclic GFR-binding peptide
  MOD_RES (14)..(14): Xaa is C or S
IKRMQVPRQGTPVXEL

SEQ ID NO: 2322 - protein, 18 aa, Artificial Sequence
  Non-cyclic GFR-binding peptide
  MOD_RES (16)..(16): Xaa is C or S
MIQVTINSHHVRSPQXKV

SEQ ID NO: 2323 - protein, 13 aa, Artificial Sequence
  Non-cyclic GFR-binding peptide
IKRMQVPREETPV

SEQ ID NO: 2324 - protein, 14 aa, Artificial Sequence
  Non-cyclic GFR-binding peptide
MIQVTINSLQVQTP

SEQ ID NO: 2325 - protein, 10 aa, Artificial Sequence
  Non-cyclic GFR-binding peptide
MIQVTINSHH

SEQ ID NO: 2326 - protein, 13 aa, Artificial Sequence
  Non-cyclic GFR-binding peptide
VKAMKVSRQGTPV

SEQ ID NO: 2327 - protein, 18 aa, Artificial Sequence
  Non-cyclic GFR-binding peptide
  MOD_RES (14)..(14): Xaa is C or S
VKAMKVSRQGTPVXELGE

SEQ ID NO: 2328 - protein, 16 aa, Artificial Sequence
  Non-cyclic GFR-binding peptide
  MOD_RES (16)..(16): Xaa is C or S
VKAVKVSRLQVQTPRX

SEQ ID NO: 2329 - protein, 14 aa, Artificial Sequence
  Non-cyclic GFR-binding peptide
VKAVKVSRLQVQTP

SEQ ID NO: 2330 - protein, 13 aa, Artificial Sequence
  Non-cyclic GFR-binding peptide
IKRVQVPRHHVRS

SEQ ID NO: 2331 - protein, 12 aa, Artificial Sequence
  Non-cyclic GFR-binding peptide
IKRMQVPRQGTP

SEQ ID NO: 2332 - protein, 20 aa, Artificial Sequence
  Non-cyclic GFR-binding peptide
  MOD_RES (14)..(14): Xaa is C or S
VKAMKVSRQGTPVXELGEDN

SEQ ID NO: 2333 - protein, 17 aa, Artificial Sequence
  Non-cyclic GFR-binding peptide
  MOD_RES (16)..(16): Xaa is C or S
MIQVTINSLQVQTPRXQ

SEQ ID NO: 2334 - protein, 17 aa, Artificial Sequence
  Non-cyclic GFR-binding peptide
  MOD_RES (14)..(14): Xaa is C or S
VKAMKVSRQGTPVXELG

SEQ ID NO: 2335 - protein, 11 aa, Artificial Sequence
  Non-cyclic GFR-binding peptide
VKAMKVSREET

SEQ ID NO: 2336 - protein, 18 aa, Artificial Sequence
  Non-cyclic GFR-binding peptide
  MOD_RES (14)..(14): Xaa is C or S
IKRMQVPREETPVXELGE

SEQ ID NO: 2337 - protein, 11 aa, Artificial Sequence
  Non-cyclic GFR-binding peptide
IKRVQVPRHHV

SEQ ID NO: 2338 - protein, 9 aa, Artificial Sequence
  Non-cyclic GFR-binding peptide
VKAMKVSRE

SEQ ID NO: 2339 - protein, 18 aa, Artificial Sequence
  Non-cyclic GFR-binding peptide
  MOD_RES (16)..(16): Xaa is C or S
IKRVQVPRHHVRSPQXKV

SEQ ID NO: 2340 - protein, 18 aa, Artificial Sequence
  Non-cyclic GFR-binding peptide
  MOD_RES (14)..(14): Xaa is C or S
IKRMQVPRQGTPVXELGE

SEQ ID NO: 2341 - protein, 17 aa, Artificial Sequence
  Non-cyclic GFR-binding peptide
  MOD_RES (16)..(16): Xaa is C or S
VKAVKVSRLQVQTPRXQ

SEQ ID NO: 2342 - protein, 20 aa, Artificial Sequence
  Non-cyclic GFR-binding peptide
  MOD_RES (14)..(14): Xaa is C or S
IKRMQVPRQGTPVXELGEDN

SEQ ID NO: 2343 - protein, 11 aa, Artificial Sequence
  Non-cyclic GFR-binding peptide
VKAVKVSRLQV

SEQ ID NO: 2344 - protein, 12 aa, Artificial Sequence
  Non-cyclic GFR-binding peptide
VKAMKVSREETP

SEQ ID NO: 2345 - protein, 17 aa, Artificial Sequence
  Non-cyclic GFR-binding peptide
  MOD_RES (16)..(16): Xaa is C or S
IKRVQVPRHHVRSPQXK

SEQ ID NO: 2346 - protein, 15 aa, Artificial Sequence
  Non-cyclic GFR-binding peptide
  MOD_RES (14)..(14): Xaa is C or S
IKRMQVPRQGTPVXE

SEQ ID NO: 2347 - protein, 10 aa, Artificial Sequence
  Non-cyclic GFR-binding peptide
IKRMQVPRQG

SEQ ID NO: 2348 - protein, 17 aa, Artificial Sequence
  Non-cyclic GFR-binding peptide
  MOD_RES (14)..(14): Xaa is C or S
VKAMKVSREETPVXELG

SEQ ID NO: 2349 - protein, 20 aa, Artificial Sequence
  Non-cyclic GFR-binding peptide
  MOD_RES (14)..(14): Xaa is C or S
IKRMQVPREETPVXELGEDN

SEQ ID NO: 2350 - protein, 17 aa, Artificial Sequence
  Non-cyclic GFR-binding peptide
  MOD_RES (14)..(14): Xaa is C or S
IKRMQVPRQGTPVXELG

SEQ ID NO: 2351 - protein, 9 aa, Artificial Sequence
  Non-cyclic GFR-binding peptide
IKRMQVPRE

SEQ ID NO: 2352 - protein, 19 aa, Artificial Sequence
  Non-cyclic GFR-binding peptide
  MOD_RES (16)..(16): Xaa is C or S
MIQVTINSHHVRSPQXKVS

SEQ ID NO: 2353 - protein, 9 aa, Artificial Sequence
  Non-cyclic GFR-binding peptide
MIQVTINSL

SEQ ID NO: 2354 - protein, 16 aa, Artificial Sequence
  Non-cyclic GFR-binding peptide
  MOD_RES (14)..(14): Xaa is C or S
VKAMKVSREETPVXEL

SEQ ID NO: 2355 - protein, 18 aa, Artificial Sequence
  Non-cyclic GFR-binding peptide
  MOD_RES (14)..(14): Xaa is C or S
VKAMKVSREETPVXELGE

SEQ ID NO: 2356 - protein, 16 aa, Artificial Sequence
  Non-cyclic GFR-binding peptide
  MOD_RES (16)..(16): Xaa is C or S
IKRVQVPRHHVRSPQX

SEQ ID NO: 2357 - protein, 19 aa, Artificial Sequence
  Non-cyclic GFR-binding peptide
  MOD_RES (16)..(16): Xaa is C or S
MIQVTINSLQVQTPRXQVN

SEQ ID NO: 2358 - protein, 9 aa, Artificial Sequence
  Non-cyclic GFR-binding peptide
IKRVQVPRH

SEQ ID NO: 2359 - protein, 16 aa, Artificial Sequence
  Non-cyclic GFR-binding peptide
  MOD_RES (16)..(16): Xaa is C or S
MIQVTINSHHVRSPQX

SEQ ID NO: 2360 - protein, 9 aa, Artificial Sequence
  Non-cyclic GFR-binding peptide
MIQVTINSH

SEQ ID NO: 2361 - protein, 15 aa, Artificial Sequence
  Non-cyclic GFR-binding peptide
  MOD_RES (14)..(14): Xaa is C or S
IKRMQVPREETPVXE

SEQ ID NO: 2362 - protein, 10 aa, Artificial Sequence
  Non-cyclic GFR-binding peptide
IKRMQVPREE

SEQ ID NO: 2363 - protein, 12 aa, Artificial Sequence
  Non-cyclic GFR-binding peptide
VKAMKVSRQGTP

SEQ ID NO: 2364 - protein, 12 aa, Artificial Sequence
  Non-cyclic GFR-binding peptide
MIQVTINSLQVQ

SEQ ID NO: 2365 - protein, 13 aa, Artificial Sequence
  Non-cyclic GFR-binding peptide
TQVQLRSVKVAKV

SEQ ID NO: 2366 - protein, 18 aa, Artificial Sequence
  Non-cyclic GFR-binding peptide
  MOD_RES (3)..(3): Xaa is C or S
VQXRPTQVQLSNITVQIM

SEQ ID NO: 2367 - protein, 13 aa, Artificial Sequence
  Non-cyclic GFR-binding peptide
VPTGQRPVQMRKI

SEQ ID NO: 2368 - protein, 11 aa, Artificial Sequence
  Non-cyclic GFR-binding peptide
TEERPVQMRKI

SEQ ID NO: 2369 - protein, 14 aa, Artificial Sequence
  Non-cyclic GFR-binding peptide
PSRVHHRPVQVRKI

SEQ ID NO: 2370 - protein, 12 aa, Artificial Sequence
  Non-cyclic GFR-binding peptide
RVHHSNITVQIM

SEQ ID NO: 2371 - protein, 19 aa, Artificial Sequence
  Non-cyclic GFR-binding peptide
  MOD_RES (6)..(6): Xaa is C or S
DEGLEXVPTGQRPVQMRKI

SEQ ID NO: 2372 - protein, 14 aa, Artificial Sequence
  Non-cyclic GFR-binding peptide
  MOD_RES (1)..(1): Xaa is C or S
XVPTEERSVKMAKV

SEQ ID NO: 2373 - protein, 10 aa, Artificial Sequence
  Non-cyclic GFR-binding peptide
QLSNITVQIM

SEQ ID NO: 2374 - protein, 15 aa, Artificial Sequence
  Non-cyclic GFR-binding peptide
RPTQVQLSNITVQIM

SEQ ID NO: 2375 - protein, 15 aa, Artificial Sequence
  Non-cyclic GFR-binding peptide
RPTQVQLRSVKVAKV

SEQ ID NO: 2376 - protein, 9 aa, Artificial Sequence
  Non-cyclic GFR-binding peptide
QRPVQMRKI

SEQ ID NO: 2377 - protein, 20 aa, Artificial Sequence
  Non-cyclic GFR-binding peptide
  MOD_RES (5)..(5): Xaa is C or S
RNVQXRPTQVQLSNITVQIM

SEQ ID NO: 2378 - protein, 15 aa, Artificial Sequence
  Non-cyclic GFR-binding peptide
QPSRVHHRPVQVRKI

SEQ ID NO: 2379 - protein, 14 aa, Artificial Sequence
  Non-cyclic GFR-binding peptide
  MOD_RES (1)..(1): Xaa is C or S
XVPTGQRPVQMRKI

SEQ ID NO: 2380 - protein, 16 aa, Artificial Sequence
  Non-cyclic GFR-binding peptide
  MOD_RES (3)..(3): Xaa is C or S
LEXVPTGQRSVKMAKV

SEQ ID NO: 2381 - protein, 19 aa, Artificial Sequence
  Non-cyclic GFR-binding peptide
  MOD_RES (4)..(4): Xaa is C or S
SVKXQPSRVHHRPVQVRKI

SEQ ID NO: 2382 - protein, 11 aa, Artificial Sequence
  Non-cyclic GFR-binding peptide
TGQRSVKMAKV

SEQ ID NO: 2383 - protein, 17 aa, Artificial Sequence
  Non-cyclic GFR-binding peptide
  MOD_RES (4)..(4): Xaa is C or S
GLEXVPTEERPVQMRKI

SEQ ID NO: 2384 - protein, 20 aa, Artificial Sequence
  Non-cyclic GFR-binding peptide
  MOD_RES (5)..(5): Xaa is C or S
RNVQXRPTQVQLRSVKVAKV

SEQ ID NO: 2385 - protein, 19 aa, Artificial Sequence
  Non-cyclic GFR-binding peptide
  MOD_RES (6)..(6): Xaa is C or S
DEGLEXVPTEERSVKMAKV

SEQ ID NO: 2386 - protein, 13 aa, Artificial Sequence
  Non-cyclic GFR-binding peptide
TQVQLSNITVQIM

SEQ ID NO: 2387 - protein, 13 aa, Artificial Sequence
  Non-cyclic GFR-binding peptide
VPTEERSVKMAKV

SEQ ID NO: 2388 - protein, 11 aa, Artificial Sequence
  Non-cyclic GFR-binding peptide
VQLSNITVQIM

SEQ ID NO: 2389 - protein, 20 aa, Artificial Sequence
  Non-cyclic GFR-binding peptide
  MOD_RES (7)..(7): Xaa is C or S
NDEGLEXVPTEERSVKMAKV

SEQ ID NO: 2390 - protein, 16 aa, Artificial Sequence
  Non-cyclic GFR-binding peptide
  MOD_RES (3)..(3): Xaa is C or S
LEXVPTEERPVQMRKI

SEQ ID NO: 2391 - protein, 17 aa, Artificial Sequence
  Non-cyclic GFR-binding peptide
  MOD_RES (2)..(2): Xaa is C or S
KXQPSRVHHSNITVQIM

SEQ ID NO: 2392 - protein, 18 aa, Artificial Sequence
  Non-cyclic GFR-binding peptide
  MOD_RES (3)..(3): Xaa is C or S
VQXRPTQVQLRSVKVAKV

SEQ ID NO: 2393 - protein, 16 aa, Artificial Sequence
  Non-cyclic GFR-binding peptide
  MOD_RES (1)..(1): Xaa is C or S
XRPTQVQLSNITVQIM

SEQ ID NO: 2394 - protein, 14 aa, Artificial Sequence
  Non-cyclic GFR-binding peptide
PSRVHHSNITVQIM

SEQ ID NO: 2395 - protein, 12 aa, Artificial Sequence
  Non-cyclic GFR-binding peptide
RVHHRPVQVRKI

SEQ ID NO: 2396 - protein, 10 aa, Artificial Sequence
  Non-cyclic GFR-binding peptide
HHRPVQVRKI

SEQ ID NO: 2397 - protein, 15 aa, Artificial Sequence
  Non-cyclic GFR-binding peptide
  MOD_RES (2)..(2): Xaa is C or S
EXVPTGQRSVKMAKV

SEQ ID NO: 2398 - protein, 10 aa, Artificial Sequence
  Non-cyclic GFR-binding peptide
GQRSVKMAKV

SEQ ID NO: 2399 - protein, 12 aa, Artificial Sequence
  Non-cyclic GFR-binding peptide
PTEERPVQMRKI

SEQ ID NO: 2400 - protein, 20 aa, Artificial Sequence
  Non-cyclic GFR-binding peptide
  MOD_RES (5)..(5): Xaa is C or S
SSVKXQPSRVHHRPVQVRKI

SEQ ID NO: 2401 - protein, 15 aa, Artificial Sequence
  Non-cyclic GFR-binding peptide
  MOD_RES (2)..(2): Xaa is C or S
EXVPTEERSVKMAKV

SEQ ID NO: 2402 - protein, 10 aa, Artificial Sequence
  Non-cyclic GFR-binding peptide
EERSVKMAKV

SEQ ID NO: 2403 - protein, 19 aa, Artificial Sequence
  Non-cyclic GFR-binding peptide
  MOD_RES (6)..(6): Xaa is C or S
DEGLEXVPTGQRSVKMAKV

SEQ ID NO: 2404 - protein, 14 aa, Artificial Sequence
  Non-cyclic GFR-binding peptide
  MOD_RES (1)..(1): Xaa is C or S
XVPTEERPVQMRKI

SEQ ID NO: 2405 - protein, 13 aa, Artificial Sequence
  Non-cyclic GFR-binding peptide
SRVHHSNITVQIM

SEQ ID NO: 2406 - protein, 15 aa, Artificial Sequence
  Non-cyclic GFR-binding peptide
QPSRVHHSNITVQIM

SEQ ID NO: 2407 - protein, 12 aa, Artificial Sequence
  Non-cyclic GFR-binding peptide
QVQLRSVKVAKV

SEQ ID NO: 2408 - protein, 9 aa, Artificial Sequence
  Non-cyclic GFR-binding peptide
QRSVKMAKV

SEQ ID NO: 2409 - protein, 9 aa, Artificial Sequence
  Non-cyclic GFR-binding peptide
LRSVKVAKV

SEQ ID NO: 2410 - protein, 10 aa, Artificial Sequence
  Non-cyclic GFR-binding peptide
QLRSVKVAKV

SEQ ID NO: 2411 - protein, 20 aa, Artificial Sequence
  Non-cyclic GFR-binding peptide
  MOD_RES (5)..(5): Xaa is C or S
SSVKXQPSRVHHSNITVQIM

SEQ ID NO: 2412 - protein, 19 aa, Artificial Sequence
  Non-cyclic GFR-binding peptide
  MOD_RES (4)..(4): Xaa is C or S
NVQXRPTQVQLRSVKVAKV

SEQ ID NO: 2413 - protein, 14 aa, Artificial Sequence
  Non-cyclic GFR-binding peptide
  MOD_RES (1)..(1): Xaa is C or S
XVPTGQRSVKMAKV

SEQ ID NO: 2414 - protein, 19 aa, Artificial Sequence
  Non-cyclic GFR-binding peptide
  MOD_RES (6)..(6): Xaa is C or S
DEGLEXVPTEERPVQMRKI

SEQ ID NO: 2415 - protein, 11 aa, Artificial Sequence
  Non-cyclic GFR-binding peptide
VHHSNITVQIM

SEQ ID NO: 2416 - protein, 11 aa, Artificial Sequence
  Non-cyclic GFR-binding peptide
TGQRPVQMRKI

SEQ ID NO: 2417 - protein, 16 aa, Artificial Sequence
  Non-cyclic GFR-binding peptide
  MOD_RES (3)..(3): Xaa is C or S
LEXVPTGQRPVQMRKI

SEQ ID NO: 2418 - protein, 18 aa, Artificial Sequence
  Non-cyclic GFR-binding peptide
  MOD_RES (3)..(3): Xaa is C or S
VKXQPSRVHHSNITVQIM

SEQ ID NO: 2419 - protein, 13 aa, Artificial Sequence
  Non-cyclic GFR-binding peptide
VPTEERPVQMRKI

SEQ ID NO: 2420 - protein, 14 aa, Artificial Sequence
  Non-cyclic GFR-binding peptide
PTQVQLSNITVQIM

SEQ ID NO: 2421 - protein, 10 aa, Artificial Sequence
  Non-cyclic GFR-binding peptide
HHSNITVQIM

SEQ ID NO: 2422 - protein, 13 aa, Artificial Sequence
  Non-cyclic GFR-binding peptide
VPTGQRSVKMAKV

SEQ ID NO: 2423 - protein, 18 aa, Artificial Sequence
  Non-cyclic GFR-binding peptide
  MOD_RES (5)..(5): Xaa is C or S
EGLEXVPTGQRSVKMAKV

SEQ ID NO: 2424 - protein, 16 aa, Artificial Sequence
  Non-cyclic GFR-binding peptide
  MOD_RES (1)..(1): Xaa is C or S
XRPTQVQLRSVKVAKV

SEQ ID NO: 2425 - protein, 14 aa, Artificial Sequence
  Non-cyclic GFR-binding peptide
PTQVQLRSVKVAKV

SEQ ID NO: 2426 - protein, 13 aa, Artificial Sequence
  Non-cyclic GFR-binding peptide
SRVHHRPVQVRKI

SEQ ID NO: 2427 - protein, 12 aa, Artificial Sequence
  Non-cyclic GFR-binding peptide
PTGQRPVQMRKI

SEQ ID NO: 2428 - protein, 20 aa, Artificial Sequence
  Non-cyclic GFR-binding peptide
  MOD_RES (7)..(7): Xaa is C or S
NDEGLEXVPTGQRSVKMAKV

SEQ ID NO: 2429 - protein, 17 aa, Artificial Sequence
  Non-cyclic GFR-binding peptide
  MOD_RES (2)..(2): Xaa is C or S
QXRPTQVQLSNITVQIM

SEQ ID NO: 2430 - protein, 17 aa, Artificial Sequence
  Non-cyclic GFR-binding peptide
  MOD_RES (4)..(4): Xaa is C or S
GLEXVPTGQRSVKMAKV

SEQ ID NO: 2431 - protein, 11 aa, Artificial Sequence
  Non-cyclic GFR-binding peptide
TEERSVKMAKV

SEQ ID NO: 2432 - protein, 18 aa, Artificial Sequence
  Non-cyclic GFR-binding peptide
  MOD_RES (5)..(5): Xaa is C or S
EGLEXVPTEERPVQMRKI

SEQ ID NO: 2433 - protein, 11 aa, Artificial Sequence
  Non-cyclic GFR-binding peptide
VHHRPVQVRKI

SEQ ID NO: 2434 - protein, 9 aa, Artificial Sequence
  Non-cyclic GFR-binding peptide
ERSVKMAKV

SEQ ID NO: 2435 - protein, 18 aa, Artificial Sequence
  Non-cyclic GFR-binding peptide
  MOD_RES (3)..(3): Xaa is C or S
VKXQPSRVHHRPVQVRKI

SEQ ID NO: 2436 - protein, 18 aa, Artificial Sequence
  Non-cyclic GFR-binding peptide
  MOD_RES (5)..(5): Xaa is C or S
EGLEXVPTGQRPVQMRKI

SEQ ID NO: 2437 - protein, 17 aa, Artificial Sequence
  Non-cyclic GFR-binding peptide
  MOD_RES (2)..(2): Xaa is C or S
QXRPTQVQLRSVKVAKV

SEQ ID NO: 2438 - protein, 20 aa, Artificial Sequence
  Non-cyclic GFR-binding peptide
  MOD_RES (7)..(7): Xaa is C or S
NDEGLEXVPTGQRPVQMRKI

SEQ ID NO: 2439 - protein, 11 aa, Artificial Sequence
  Non-cyclic GFR-binding peptide
VQLRSVKVAKV

SEQ ID NO: 2440 - protein, 12 aa, Artificial Sequence
  Non-cyclic GFR-binding peptide
PTEERSVKMAKV

SEQ ID NO: 2441 - protein, 17 aa, Artificial Sequence
  Non-cyclic GFR-binding peptide
  MOD_RES (2)..(2): Xaa is C or S
KXQPSRVHHRPVQVRKI

SEQ ID NO: 2442 - protein, 15 aa, Artificial Sequence
  Non-cyclic GFR-binding peptide
  MOD_RES (2)..(2): Xaa is C or S
EXVPTGQRPVQMRKI

SEQ ID NO: 2443 - protein, 10 aa, Artificial Sequence
  Non-cyclic GFR-binding peptide
GQRPVQMRKI

SEQ ID NO: 2444 - protein, 17 aa, Artificial Sequence
  Non-cyclic GFR-binding peptide
  MOD_RES (4)..(4): Xaa is C or S
GLEXVPTEERSVKMAKV

SEQ ID NO: 2445 - protein, 20 aa, Artificial Sequence
  Non-cyclic GFR-binding peptide
  MOD_RES (7)..(7): Xaa is C or S
NDEGLEXVPTEERPVQMRKI

SEQ ID NO: 2446 - protein, 17 aa, Artificial Sequence
  Non-cyclic GFR-binding peptide
  MOD_RES (4)..(4): Xaa is C or S
GLEXVPTGQRPVQMRKI

SEQ ID NO: 2447 - protein, 9 aa, Artificial Sequence
  Non-cyclic GFR-binding peptide
ERPVQMRKI

SEQ ID NO: 2448 - protein, 19 aa, Artificial Sequence
  Non-cyclic GFR-binding peptide
  MOD_RES (4)..(4): Xaa is C or S
SVKXQPSRVHHSNITVQIM

SEQ ID NO: 2449 - protein, 9 aa, Artificial Sequence
  Non-cyclic GFR-binding peptide
LSNITVQIM

SEQ ID NO: 2450 - protein, 16 aa, Artificial Sequence
  Non-cyclic GFR-binding peptide
  MOD_RES (3)..(3): Xaa is C or S
LEXVPTEERSVKMAKV

SEQ ID NO: 2451 - protein, 18 aa, Artificial Sequence
  Non-cyclic GFR-binding peptide
  MOD_RES (5)..(5): Xaa is C or S
EGLEXVPTEERSVKMAKV

SEQ ID NO: 2452 - protein, 16 aa, Artificial Sequence
  Non-cyclic GFR-binding peptide
  MOD_RES (1)..(1): Xaa is C or S
XQPSRVHHRPVQVRKI

SEQ ID NO: 2453 - protein, 19 aa, Artificial Sequence
  Non-cyclic GFR-binding peptide
  MOD_RES (4)..(4): Xaa is C or S
NVQXRPTQVQLSNITVQIM

SEQ ID NO: 2454 - protein, 9 aa, Artificial Sequence
  Non-cyclic GFR-binding peptide
HRPVQVRKI

SEQ ID NO: 2455 - protein, 16 aa, Artificial Sequence
  Non-cyclic GFR-binding peptide
  MOD_RES (1)..(1): Xaa is C or S
XQPSRVHHSNITVQIM

SEQ ID NO: 2456 - protein, 9 aa, Artificial Sequence
  Non-cyclic GFR-binding peptide
HSNITVQIM

SEQ ID NO: 2457 - protein, 15 aa, Artificial Sequence
  Non-cyclic GFR-binding peptide
  MOD_RES (2)..(2): Xaa is C or S
EXVPTEERPVQMRKI

SEQ ID NO: 2458 - protein, 10 aa, Artificial Sequence
  Non-cyclic GFR-binding peptide
EERPVQMRKI

SEQ ID NO: 2459 - protein, 12 aa, Artificial Sequence
  Non-cyclic GFR-binding peptide
PTGQRSVKMAKV

SEQ ID NO: 2460 - protein, 12 aa, Artificial Sequence
  Non-cyclic GFR-binding peptide
QVQLSNITVQIM

SEQ ID NO: 2461 - protein, 10 aa, Artificial Sequence
  Non-cyclic GFR-binding peptide
IYLMSIPSLE

SEQ ID NO: 2462 - protein, 18 aa, Artificial Sequence
  Non-cyclic GFR-binding peptide
  MOD_RES (14)..(15): Xaa is C or S
IYLISIPSLDQSVXXPSA

SEQ ID NO: 2463 - protein, 13 aa, Artificial Sequence
  Non-cyclic GFR-binding peptide
LYLISIPELDQPV

SEQ ID NO: 2464 - protein, 14 aa, Artificial Sequence
  Non-cyclic GFR-binding peptide
  MOD_RES (14)..(14): Xaa is C or S
FYLISIANLKTPVX

SEQ ID NO: 2465 - protein, 13 aa, Artificial Sequence
  Non-cyclic GFR-binding peptide
LYLMSIPELETPV

SEQ ID NO: 2466 - protein, 15 aa, Artificial Sequence
  Non-cyclic GFR-binding peptide
  MOD_RES (14)..(15): Xaa is C or S
LYLVSIPELKTPAXX

SEQ ID NO: 2467 - protein, 19 aa, Artificial Sequence
  Non-cyclic GFR-binding peptide
  MOD_RES (14)..(15): Xaa is C or S
KYLISIPSLRAPVXXSAPA

SEQ ID NO: 2468 - protein, 14 aa, Artificial Sequence
  Non-cyclic GFR-binding peptide
  MOD_RES (14)..(14): Xaa is C or S
LYLISIPELDQSVX

SEQ ID NO: 2469 - protein, 16 aa, Artificial Sequence
  Non-cyclic GFR-binding peptide
  MOD_RES (14)..(14): Xaa is C or S
LYLVSIPELKTPAXTP

SEQ ID NO: 2470 - protein, 19 aa, Artificial Sequence
  Non-cyclic GFR-binding peptide
  MOD_RES (14)..(15): Xaa is C or S
LYLVSIPELKTPAXXPKPV

SEQ ID NO: 2471 - protein, 10 aa, Artificial Sequence
  Non-cyclic GFR-binding peptide
LYLISIPELD

SEQ ID NO: 2472 - protein, 17 aa, Artificial Sequence
  Non-cyclic GFR-binding peptide
  MOD_RES (14)..(15): Xaa is C or S
LYLISIPELRAPVXXSA

SEQ ID NO: 2473 - protein, 12 aa, Artificial Sequence
  Non-cyclic GFR-binding peptide
IYLISIPSLAQP

SEQ ID NO: 2474 - protein, 12 aa, Artificial Sequence
  Non-cyclic GFR-binding peptide
FYLISIANLRAP

SEQ ID NO: 2475 - protein, 18 aa, Artificial Sequence
  Non-cyclic GFR-binding peptide
  MOD_RES (14)..(15): Xaa is C or S
IYLMSIPSLETPVXXAKP

SEQ ID NO: 2476 - protein, 14 aa, Artificial Sequence
  Non-cyclic GFR-binding peptide
  MOD_RES (14)..(14): Xaa is C or S
IYLISIPSLKTPVX

SEQ ID NO: 2477 - protein, 14 aa, Artificial Sequence
  Non-cyclic GFR-binding peptide
  MOD_RES (14)..(14): Xaa is C or S
KYLISIPSLKTPVX

SEQ ID NO: 2478 - protein, 19 aa, Artificial Sequence
  Non-cyclic GFR-binding peptide
  MOD_RES (14)..(15): Xaa is C or S
LYLVSIPELKTPVXXAKGV

SEQ ID NO: 2479 - protein, 16 aa, Artificial Sequence
  Non-cyclic GFR-binding peptide
  MOD_RES (14)..(15): Xaa is C or S
LYLISIPELDQPVXXP

SEQ ID NO: 2480 - protein, 17 aa, Artificial Sequence
  Non-cyclic GFR-binding peptide
  MOD_RES (14)..(15): Xaa is C or S
LYLISIPELDQSVXXPS

SEQ ID NO: 2481 - protein, 16 aa, Artificial Sequence
  Non-cyclic GFR-binding peptide
  MOD_RES (14)..(15): Xaa is C or S
FYLISIANLRAPVXXS

SEQ ID NO: 2482 - protein, 9 aa, Artificial Sequence
  Non-cyclic GFR-binding peptide
LYLVSIPEL

SEQ ID NO: 2483 - protein, 19 aa, Artificial Sequence
  Non-cyclic GFR-binding peptide
  MOD_RES (14)..(15): Xaa is C or S
FYLISIANLRAPVXXSAPA

SEQ ID NO: 2484 - protein, 20 aa, Artificial Sequence
  Non-cyclic GFR-binding peptide
  MOD_RES (14)..(15): Xaa is C or S
LYLISIPELDQSVXXPSASA

SEQ ID NO: 2485 - protein, 12 aa, Artificial Sequence
  Non-cyclic GFR-binding peptide
IYLVSIPSLQTP

SEQ ID NO: 2486 - protein, 17 aa, Artificial Sequence
  Non-cyclic GFR-binding peptide
  MOD_RES (14)..(14): Xaa is C or S
LYLVSIPELKTPAXTPK

SEQ ID NO: 2487 - protein, 10 aa, Artificial Sequence
  Non-cyclic GFR-binding peptide
IYLVSIPSLK

SEQ ID NO: 2488 - protein, 11 aa, Artificial Sequence
  Non-cyclic GFR-binding peptide
LYLISIPELAQ

SEQ ID NO: 2489 - protein, 16 aa, Artificial Sequence
  Non-cyclic GFR-binding peptide
  MOD_RES (14)..(15): Xaa is C or S
KYLISIPSLRAPVXXS

SEQ ID NO: 2490 - protein, 17 aa, Artificial Sequence
  Non-cyclic GFR-binding peptide
  MOD_RES (14)..(15): Xaa is C or S
LYLVSIPELKTPAXXAK

SEQ ID NO: 2491 - protein, 10 aa, Artificial Sequence
  Non-cyclic GFR-binding peptide
LYLISIPELR

SEQ ID NO: 2492 - protein, 13 aa, Artificial Sequence
  Non-cyclic GFR-binding peptide
FYLISIANLRAPV

SEQ ID NO: 2493 - protein, 20 aa, Artificial Sequence
  Non-cyclic GFR-binding peptide
  MOD_RES (14)..(15): Xaa is C or S
LYLMSIPELETPVXXAKPIS

SEQ ID NO: 2494 - protein, 20 aa, Artificial Sequence
  Non-cyclic GFR-binding peptide
  MOD_RES (14)..(15): Xaa is C or S
LYLISIPELRAPVXXSAPAA

SEQ ID NO: 2495 - protein, 20 aa, Artificial Sequence
  Non-cyclic GFR-binding peptide
  MOD_RES (14)..(14): Xaa is C or S
LYLVSIPELKTPAXTPKTVH

SEQ ID NO: 2496 - protein, 15 aa, Artificial Sequence
  Non-cyclic GFR-binding peptide
  MOD_RES (14)..(15): Xaa is C or S
KYLISIPSLRAPVXX

SEQ ID NO: 2497 - protein, 15 aa, Artificial Sequence
  Non-cyclic GFR-binding peptide
  MOD_RES (14)..(15): Xaa is C or S
LYLMSIPELETPVXX

SEQ ID NO: 2498 - protein, 15 aa, Artificial Sequence
  Non-cyclic GFR-binding peptide
  MOD_RES (14)..(14): Xaa is C or S
LYLVSIPELKTPAXT

SEQ ID NO: 2499 - protein, 15 aa, Artificial Sequence
  Non-cyclic GFR-binding peptide
  MOD_RES (14)..(15): Xaa is C or S
LYLISIPELDQPVXX

SEQ ID NO: 2500 - protein, 14 aa, Artificial Sequence
  Non-cyclic GFR-binding peptide
  MOD_RES (14)..(14): Xaa is C or S
LYLVSIPELQTPAX

SEQ ID NO: 2501 - protein, 11 aa, Artificial Sequence
  Non-cyclic GFR-binding peptide
IYLISIPSLDQ

SEQ ID NO: 2502 - protein, 18 aa, Artificial Sequence
  Non-cyclic GFR-binding peptide
  MOD_RES (14)..(15): Xaa is C or S
FYLISIANLRAPVXXSAP

SEQ ID NO: 2503 - protein, 19 aa, Artificial Sequence
  Non-cyclic GFR-binding peptide
  MOD_RES (14)..(15): Xaa is C or S
LYLISIPELAQPVXXPAAS

SEQ ID NO: 2504 - protein, 11 aa, Artificial Sequence
  Non-cyclic GFR-binding peptide
LYLVSIPELQT

SEQ ID NO: 2505 - protein, 13 aa, Artificial Sequence
  Non-cyclic GFR-binding peptide
LYLVSIPELKTPV

SEQ ID NO: 2506 - protein, 11 aa, Artificial Sequence
  Non-cyclic GFR-binding peptide
IYLMSIPSLET

SEQ ID NO: 2507 - protein, 13 aa, Artificial Sequence
  Non-cyclic GFR-binding peptide
KYLISIPSLRAPV

SEQ ID NO: 2508 - protein, 11 aa, Artificial Sequence
  Non-cyclic GFR-binding peptide
IYLVSIPSLKT

SEQ ID NO: 2509 - protein, 16 aa, Artificial Sequence
  Non-cyclic GFR-binding peptide
  MOD_RES (14)..(15): Xaa is C or S
LYLVSIPELKTPAXXP

SEQ ID NO: 2510 - protein, 17 aa, Artificial Sequence
  Non-cyclic GFR-binding peptide
  MOD_RES (14)..(15): Xaa is C or S
IYLMSIPSLETPVXXAK

SEQ ID NO: 2511 - protein, 15 aa, Artificial Sequence
  Non-cyclic GFR-binding peptide
  MOD_RES (14)..(15): Xaa is C or S
LYLVSIPELKTPVXX

SEQ ID NO: 2512 - protein, 17 aa, Artificial Sequence
  Non-cyclic GFR-binding peptide
  MOD_RES (14)..(15): Xaa is C or S
IYLISIPSLAQPVXXPA

SEQ ID NO: 2513 - protein, 15 aa, Artificial Sequence
  Non-cyclic GFR-binding peptide
  MOD_RES (14)..(15): Xaa is C or S
FYLISIANLRAPVXX

SEQ ID NO: 2514 - protein, 9 aa, Artificial Sequence
  Non-cyclic GFR-binding peptide
LYLMSIPEL

SEQ ID NO: 2515 - protein, 18 aa, Artificial Sequence
  Non-cyclic GFR-binding peptide
  MOD_RES (14)..(15): Xaa is C or S
IYLVSIPSLKTPVXXAKG

SEQ ID NO: 2516 - protein, 19 aa, Artificial Sequence
  Non-cyclic GFR-binding peptide
  MOD_RES (14)..(15): Xaa is C or S
LYLISIPELDQPVXXPSAS

SEQ ID NO: 2517 - protein, 20 aa, Artificial Sequence
  Non-cyclic GFR-binding peptide
  MOD_RES (14)..(15): Xaa is C or S
LYLVSIPELKTPVXXAKGVK

SEQ ID NO: 2518 - protein, 20 aa, Artificial Sequence
  Non-cyclic GFR-binding peptide
  MOD_RES (14)..(15): Xaa is C or S
IYLVSIPSLQTPAXXPKPVT

SEQ ID NO: 2519 - protein, 17 aa, Artificial Sequence
  Non-cyclic GFR-binding peptide
  MOD_RES (14)..(15): Xaa is C or S
LYLISIPELAQPVXXPA

SEQ ID NO: 2520 - protein, 18 aa, Artificial Sequence
  Non-cyclic GFR-binding peptide
  MOD_RES (14)..(15): Xaa is C or S
IYLISIPSLDQPVXXPSA

SEQ ID NO: 2521 - protein, 14 aa, Artificial Sequence
  Non-cyclic GFR-binding peptide
  MOD_RES (14)..(14): Xaa is C or S
IYLVSIPSLKTPVX

SEQ ID NO: 2522 - protein, 17 aa, Artificial Sequence
  Non-cyclic GFR-binding peptide
  MOD_RES (14)..(15): Xaa is C or S
IYLISIPSLDQPVXXPS

SEQ ID NO: 2523 - protein, 16 aa, Artificial Sequence
  Non-cyclic GFR-binding peptide
  MOD_RES (14)..(15): Xaa is C or S
IYLISIPSLAQPVXXP

SEQ ID NO: 2524 - protein, 20 aa, Artificial Sequence
  Non-cyclic GFR-binding peptide
  MOD_RES (14)..(15): Xaa is C or S
IYLVSIPSLKTPAXXAKPVA

SEQ ID NO: 2525 - protein, 16 aa, Artificial Sequence
  Non-cyclic GFR-binding peptide
  MOD_RES (14)..(15): Xaa is C or S
LYLVSIPELQTPAXXP

SEQ ID NO: 2526 - protein, 20 aa, Artificial Sequence
  Non-cyclic GFR-binding peptide
  MOD_RES (14)..(15): Xaa is C or S
LYLVSIPELQTPAXXPKPVT

SEQ ID NO: 2527 - protein, 19 aa, Artificial Sequence
  Non-cyclic GFR-binding peptide
  MOD_RES (14)..(15): Xaa is C or S
LYLVSIPELQTPAXXPKPV

SEQ ID NO: 2528 - protein, 19 aa, Artificial Sequence
  Non-cyclic GFR-binding peptide
  MOD_RES (14)..(15): Xaa is C or S
IYLISIPSLDQSVXXPSAS

SEQ ID NO: 2529 - protein, 17 aa, Artificial Sequence
  Non-cyclic GFR-binding peptide
  MOD_RES (14)..(15): Xaa is C or S
LYLVSIPELKTPAXXPK

SEQ ID NO: 2530 - protein, 11 aa, Artificial Sequence
  Non-cyclic GFR-binding peptide
LYLVSIPELKT

SEQ ID NO: 2531 - protein, 18 aa, Artificial Sequence
  Non-cyclic GFR-binding peptide
  MOD_RES (14)..(15): Xaa is C or S
LYLISIPELDQPVXXPSA

SEQ ID NO: 2532 - protein, 20 aa, Artificial Sequence
  Non-cyclic GFR-binding peptide
  MOD_RES (14)..(15): Xaa is C or S
LYLISIPELAQPVXXPAASA

SEQ ID NO: 2533 - protein, 13 aa, Artificial Sequence
  Non-cyclic GFR-binding peptide
FYLISIANLKTPV

SEQ ID NO: 2534 - protein, 20 aa, Artificial Sequence
  Non-cyclic GFR-binding peptide
  MOD_RES (14)..(15): Xaa is C or S
IYLVSIPSLKTPVXXAKGVK

SEQ ID NO: 2535 - protein, 15 aa, Artificial Sequence
  Non-cyclic GFR-binding peptide
  MOD_RES (14)..(15): Xaa is C or S
FYLISIANLKTPVXX

SEQ ID NO: 2536 - protein, 17 aa, Artificial Sequence
  Non-cyclic GFR-binding peptide
  MOD_RES (14)..(15): Xaa is C or S
LYLMSIPELETPVXXAK

SEQ ID NO: 2537 - protein, 12 aa, Artificial Sequence
  Non-cyclic GFR-binding peptide
KYLISIPSLRAP

SEQ ID NO: 2538 - protein, 15 aa, Artificial Sequence
  Non-cyclic GFR-binding peptide
  MOD_RES (14)..(14): Xaa is C or S
IYLVSIPSLKTPAXT

SEQ ID NO: 2539 - protein, 12 aa, Artificial Sequence
  Non-cyclic GFR-binding peptide
IYLMSIPSLETP

SEQ ID NO: 2540 - protein, 9 aa, Artificial Sequence
  Non-cyclic GFR-binding peptide
IYLMSIPSL

SEQ ID NO: 2541 - protein, 13 aa, Artificial Sequence
  Non-cyclic GFR-binding peptide
LYLVSIPELKTPA

SEQ ID NO: 2542 - protein, 10 aa, Artificial Sequence
  Non-cyclic GFR-binding peptide
KYLISIPSLK

SEQ ID NO: 2543 - protein, 10 aa, Artificial Sequence
  Non-cyclic GFR-binding peptide
IYLISIPSLK

SEQ ID NO: 2544 - protein, 11 aa, Artificial Sequence
  Non-cyclic GFR-binding peptide
LYLISIPELRA

SEQ ID NO: 2545 - protein, 15 aa, Artificial Sequence
  Non-cyclic GFR-binding peptide
  MOD_RES (14)..(15): Xaa is C or S
IYLMSIPSLETPVXX

SEQ ID NO: 2546 - protein, 20 aa, Artificial Sequence
  Non-cyclic GFR-binding peptide
  MOD_RES (14)..(15): Xaa is C or S
IYLISIPSLDQPVXXPSASA

SEQ ID NO: 2547 - protein, 17 aa, Artificial Sequence
  Non-cyclic GFR-binding peptide
  MOD_RES (14)..(15): Xaa is C or S
LYLVSIPELKTPVXXAK

SEQ ID NO: 2548 - protein, 14 aa, Artificial Sequence
  Non-cyclic GFR-binding peptide
  MOD_RES (14)..(14): Xaa is C or S
LYLISIPELAQPVX

SEQ ID NO: 2549 - protein, 14 aa, Artificial Sequence
  Non-cyclic GFR-binding peptide
  MOD_RES (14)..(14): Xaa is C or S
IYLMSIPSLETPVX

SEQ ID NO: 2550 - protein, 16 aa, Artificial Sequence
  Non-cyclic GFR-binding peptide
  MOD_RES (14)..(15): Xaa is C or S
IYLISIPSLDQSVXXP

SEQ ID NO: 2551 - protein, 14 aa, Artificial Sequence
  Non-cyclic GFR-binding peptide
  MOD_RES (14)..(14): Xaa is C or S
LYLVSIPELKTPAX

SEQ ID NO: 2552 - protein, 18 aa, Artificial Sequence
  Non-cyclic GFR-binding peptide
  MOD_RES (14)..(14): Xaa is C or S
LYLVSIPELKTPAXTPKT

SEQ ID NO: 2553 - protein, 18 aa, Artificial Sequence
  Non-cyclic GFR-binding peptide
  MOD_RES (14)..(15): Xaa is C or S
KYLISIPSLKTPVXXAKS

SEQ ID NO: 2554 - protein, 18 aa, Artificial Sequence
  Non-cyclic GFR-binding peptide
  MOD_RES (14)..(15): Xaa is C or S
IYLISIPSLKTPVXXAKS

SEQ ID NO: 2555 - protein, 17 aa, Artificial Sequence
  Non-cyclic GFR-binding peptide
  MOD_RES (14)..(15): Xaa is C or S
LYLVSIPELQTPAXXPK

SEQ ID NO: 2556 - protein, 12 aa, Artificial Sequence
  Non-cyclic GFR-binding peptide
LYLISIPELDQP

SEQ ID NO: 2557 - protein, 14 aa, Artificial Sequence
  Non-cyclic GFR-binding peptide
  MOD_RES (14)..(14): Xaa is C or S
KYLISIPSLRAPVX

SEQ ID NO: 2558 - protein, 12 aa, Artificial Sequence
  Non-cyclic GFR-binding peptide
IYLVSIPSLKTP

SEQ ID NO: 2559 - protein, 20 aa, Artificial Sequence
  Non-cyclic GFR-binding peptide
  MOD_RES (14)..(15): Xaa is C or S
LYLMSIPELETPVXXAKPIK

SEQ ID NO: 2560 - protein, 16 aa, Artificial Sequence
  Non-cyclic GFR-binding peptide
  MOD_RES (14)..(15): Xaa is C or S
LYLVSIPELKTPVXXA

SEQ ID NO: 2561 - protein, 16 aa, Artificial Sequence
  Non-cyclic GFR-binding peptide
  MOD_RES (14)..(15): Xaa is C or S
LYLMSIPELETPVXXA

SEQ ID NO: 2562 - protein, 17 aa, Artificial Sequence
  Non-cyclic GFR-binding peptide
  MOD_RES (14)..(15): Xaa is C or S
FYLISIANLKTPVXXAK

SEQ ID NO: 2563 - protein, 18 aa, Artificial Sequence
  Non-cyclic GFR-binding peptide
  MOD_RES (14)..(15): Xaa is C or S
LYLVSIPELQTPAXXPKP

SEQ ID NO: 2564 - protein, 20 aa, Artificial Sequence
  Non-cyclic GFR-binding peptide
  MOD_RES (14)..(15): Xaa is C or S
KYLISIPSLRAPVXXSAPAA

SEQ ID NO: 2565 - protein, 14 aa, Artificial Sequence
  Non-cyclic GFR-binding peptide
  MOD_RES (14)..(14): Xaa is C or S
LYLISIPELDQPVX

SEQ ID NO: 2566 - protein, 13 aa, Artificial Sequence
  Non-cyclic GFR-binding peptide
LYLVSIPELQTPA

SEQ ID NO: 2567 - protein, 16 aa, Artificial Sequence
  Non-cyclic GFR-binding peptide
  MOD_RES (14)..(15): Xaa is C or S
LYLISIPELRAPVXXS

SEQ ID NO: 2568 - protein, 15 aa, Artificial Sequence
  Non-cyclic GFR-binding peptide
  MOD_RES (14)..(15): Xaa is C or S
LYLVSIPELQTPAXX

SEQ ID NO: 2569 - protein, 19 aa, Artificial Sequence
  Non-cyclic GFR-binding peptide
  MOD_RES (14)..(15): Xaa is C or S
LYLVSIPELKTPAXXAKPV

SEQ ID NO: 2570 - protein, 11 aa, Artificial Sequence
  Non-cyclic GFR-binding peptide
FYLISIANLKT

SEQ ID NO: 2571 - protein, 19 aa, Artificial Sequence
  Non-cyclic GFR-binding peptide
  MOD_RES (14)..(14): Xaa is C or S
LYLVSIPELKTPAXTPKTV

SEQ ID NO: 2572 - protein, 12 aa, Artificial Sequence
  Non-cyclic GFR-binding peptide
IYLISIPSLKTP

SEQ ID NO: 2573 - protein, 17 aa, Artificial Sequence
  Non-cyclic GFR-binding peptide
  MOD_RES (14)..(15): Xaa is C or S
IYLISIPSLDQSVXXPS

SEQ ID NO: 2574 - protein, 20 aa, Artificial Sequence
  Non-cyclic GFR-binding peptide
  MOD_RES (14)..(15): Xaa is C or S
KYLISIPSLKTPVXXAKSAK

SEQ ID NO: 2575 - protein, 20 aa, Artificial Sequence
  Non-cyclic GFR-binding peptide
  MOD_RES (14)..(15): Xaa is C or S
IYLISIPSLKTPVXXAKSAK

SEQ ID NO: 2576 - protein, 13 aa, Artificial Sequence
  Non-cyclic GFR-binding peptide
LYLISIPELRAPV

SEQ ID NO: 2577 - protein, 15 aa, Artificial Sequence
  Non-cyclic GFR-binding peptide
  MOD_RES (14)..(15): Xaa is C or S
IYLVSIPSLKTPAXX

SEQ ID NO: 2578 - protein, 20 aa, Artificial Sequence
  Non-cyclic GFR-binding peptide
  MOD_RES (14)..(15): Xaa is C or S
FYLISIANLRAPVXXSAPAA

SEQ ID NO: 2579 - protein, 19 aa, Artificial Sequence
  Non-cyclic GFR-binding peptide
  MOD_RES (14)..(15): Xaa is C or S
LYLISIPELRAPVXXSAPA

SEQ ID NO: 2580 - protein, 16 aa, Artificial Sequence
  Non-cyclic GFR-binding peptide
  MOD_RES (14)..(15): Xaa is C or S
IYLVSIPSLKTPAXXP

SEQ ID NO: 2581 - protein, 19 aa, Artificial Sequence
  Non-cyclic GFR-binding peptide
  MOD_RES (14)..(15): Xaa is C or S
IYLISIPSLAQPVXXPAAS

SEQ ID NO: 2582 - protein, 18 aa, Artificial Sequence
  Non-cyclic GFR-binding peptide
  MOD_RES (14)..(15): Xaa is C or S
LYLMSIPELETPVXXAKP

SEQ ID NO: 2583 - protein, 18 aa, Artificial Sequence
  Non-cyclic GFR-binding peptide
  MOD_RES (14)..(15): Xaa is C or S
LYLISIPELDQSVXXPSA

SEQ ID NO: 2584 - protein, 19 aa, Artificial Sequence
  Non-cyclic GFR-binding peptide
  MOD_RES (14)..(15): Xaa is C or S
IYLMSIPSLETPVXXAKPI

SEQ ID NO: 2585 - protein, 13 aa, Artificial Sequence
  Non-cyclic GFR-binding peptide
IYLISIPSLDQPV

SEQ ID NO: 2586 - protein, 10 aa, Artificial Sequence
  Non-cyclic GFR-binding peptide
LYLMSIPELE

SEQ ID NO: 2587 - protein, 17 aa, Artificial Sequence
  Non-cyclic GFR-binding peptide
  MOD_RES (14)..(15): Xaa is C or S
KYLISIPSLRAPVXXSA

SEQ ID NO: 2588 - protein, 14 aa, Artificial Sequence
  Non-cyclic GFR-binding peptide
  MOD_RES (14)..(14): Xaa is C or S
IYLVSIPSLQTPAX

SEQ ID NO: 2589 - protein, 12 aa, Artificial Sequence
  Non-cyclic GFR-binding peptide
LYLISIPELAQP

SEQ ID NO: 2590 - protein, 12 aa, Artificial Sequence
  Non-cyclic GFR-binding peptide
KYLISIPSLKTP

SEQ ID NO: 2591 - protein, 16 aa, Artificial Sequence
  Non-cyclic GFR-binding peptide
  MOD_RES (14)..(15): Xaa is C or S
IYLMSIPSLETPVXXA

SEQ ID NO: 2592 - protein, 15 aa, Artificial Sequence
  Non-cyclic GFR-binding peptide
  MOD_RES (14)..(15): Xaa is C or S
IYLVSIPSLKTPVXX

SEQ ID NO: 2593 - protein, 11 aa, Artificial Sequence
  Non-cyclic GFR-binding peptide
KYLISIPSLRA

SEQ ID NO: 2594 - protein, 14 aa, Artificial Sequence
  Non-cyclic GFR-binding peptide
  MOD_RES (14)..(14): Xaa is C or S
IYLISIPSLDQSVX

SEQ ID NO: 2595 - protein, 13 aa, Artificial Sequence
  Non-cyclic GFR-binding peptide
IYLMSIPSLETPV

SEQ ID NO: 2596 - protein, 18 aa, Artificial Sequence
  Non-cyclic GFR-binding peptide
  MOD_RES (14)..(15): Xaa is C or S
LYLVSIPELKTPAXXPKP

SEQ ID NO: 2597 - protein, 20 aa, Artificial Sequence
  Non-cyclic GFR-binding peptide
  MOD_RES (14)..(15): Xaa is C or S
IYLMSIPSLETPVXXAKPIS

SEQ ID NO: 2598 - protein, 13 aa, Artificial Sequence
  Non-cyclic GFR-binding peptide
IYLVSIPSLKTPV

SEQ ID NO: 2599 - protein, 19 aa, Artificial Sequence
  Non-cyclic GFR-binding peptide
  MOD_RES (14)..(15): Xaa is C or S
IYLVSIPSLKTPAXXAKPV

SEQ ID NO: 2600 - protein, 18 aa, Artificial Sequence
  Non-cyclic GFR-binding peptide
  MOD_RES (14)..(15): Xaa is C or S
LYLVSIPELKTPVXXAKG

SEQ ID NO: 2601 - protein, 11 aa, Artificial Sequence
  Non-cyclic GFR-binding peptide
FYLISIANLRA

SEQ ID NO: 2602 - protein, 19 aa, Artificial Sequence
  Non-cyclic GFR-binding peptide
  MOD_RES (14)..(15): Xaa is C or S
IYLISIPSLDQPVXXPSAS

SEQ ID NO: 2603 - protein, 16 aa, Artificial Sequence
  Non-cyclic GFR-binding peptide
  MOD_RES (14)..(15): Xaa is C or S
IYLISIPSLKTPVXXA

SEQ ID NO: 2604 - protein, 20 aa, Artificial Sequence
  Non-cyclic GFR-binding peptide
  MOD_RES (14)..(15): Xaa is C or S
FYLISIANLKTPVXXAKSAK

SEQ ID NO: 2605 - protein, 16 aa, Artificial Sequence
  Non-cyclic GFR-binding peptide
  MOD_RES (14)..(15): Xaa is C or S
KYLISIPSLKTPVXXA

SEQ ID NO: 2606 - protein, 20 aa, Artificial Sequence
  Non-cyclic GFR-binding peptide
  MOD_RES (14)..(15): Xaa is C or S
IYLVSIPSLKTPAXXPKPVY

SEQ ID NO: 2607 - protein, 13 aa, Artificial Sequence
  Non-cyclic GFR-binding peptide
LYLISIPELAQPV

SEQ ID NO: 2608 - protein, 16 aa, Artificial Sequence
  Non-cyclic GFR-binding peptide
  MOD_RES (14)..(15): Xaa is C or S
FYLISIANLKTPVXXA

SEQ ID NO: 2609 - protein, 11 aa, Artificial Sequence
  Non-cyclic GFR-binding peptide
LYLMSIPELET

SEQ ID NO: 2610 - protein, 15 aa, Artificial Sequence
  Non-cyclic GFR-binding peptide
  MOD_RES (14)..(15): Xaa is C or S
LYLISIPELRAPVXX

SEQ ID NO: 2611 - protein, 12 aa, Artificial Sequence
  Non-cyclic GFR-binding peptide
LYLISIPELRAP

SEQ ID NO: 2612 - protein, 18 aa, Artificial Sequence
  Non-cyclic GFR-binding peptide
  MOD_RES (14)..(15): Xaa is C or S
LYLVSIPELKTPAXXAKP

SEQ ID NO: 2613 - protein, 11 aa, Artificial Sequence
  Non-cyclic GFR-binding peptide
IYLVSIPSLQT

SEQ ID NO: 2614 - protein, 19 aa, Artificial Sequence
  Non-cyclic GFR-binding peptide
  MOD_RES (14)..(15): Xaa is C or S
KYLISIPSLKTPVXXAKSA

SEQ ID NO: 2615 - protein, 19 aa, Artificial Sequence
  Non-cyclic GFR-binding peptide
  MOD_RES (14)..(15): Xaa is C or S
IYLISIPSLKTPVXXAKSA

SEQ ID NO: 2616 - protein, 17 aa, Artificial Sequence
  Non-cyclic GFR-binding peptide
  MOD_RES (14)..(15): Xaa is C or S
FYLISIANLRAPVXXSA

SEQ ID NO: 2617 - protein, 19 aa, Artificial Sequence
  Non-cyclic GFR-binding peptide
  MOD_RES (14)..(15): Xaa is C or S
IYLVSIPSLQTPAXXPKPV

SEQ ID NO: 2618 - protein, 11 aa, Artificial Sequence
  Non-cyclic GFR-binding peptide
LYLISIPELDQ

SEQ ID NO: 2619 - protein, 19 aa, Artificial Sequence
  Non-cyclic GFR-binding peptide
  MOD_RES (14)..(15): Xaa is C or S
FYLISIANLKTPVXXAKSA

SEQ ID NO: 2620 - protein, 12 aa, Artificial Sequence
  Non-cyclic GFR-binding peptide
LYLISIPELDQS

SEQ ID NO: 2621 - protein, 16 aa, Artificial Sequence
  Non-cyclic GFR-binding peptide
  MOD_RES (14)..(15): Xaa is C or S
IYLVSIPSLKTPAXXA

SEQ ID NO: 2622 - protein, 9 aa, Artificial Sequence
  Non-cyclic GFR-binding peptide
IYLVSIPSL

SEQ ID NO: 2623 - protein, 12 aa, Artificial Sequence
  Non-cyclic GFR-binding peptide
FYLISIANLKTP

SEQ ID NO: 2624 - protein, 16 aa, Artificial Sequence
  Non-cyclic GFR-binding peptide
  MOD_RES (14)..(14): Xaa is C or S
IYLVSIPSLKTPAXTP

SEQ ID NO: 2625 - protein, 17 aa, Artificial Sequence
  Non-cyclic GFR-binding peptide
  MOD_RES (14)..(15): Xaa is C or S
IYLVSIPSLKTPVXXAK

SEQ ID NO: 2626 - protein, 19 aa, Artificial Sequence
  Non-cyclic GFR-binding peptide
  MOD_RES (14)..(15): Xaa is C or S
IYLVSIPSLKTPAXXPKPV

SEQ ID NO: 2627 - protein, 10 aa, Artificial Sequence
  Non-cyclic GFR-binding peptide
LYLISIPELA

SEQ ID NO: 2628 - protein, 16 aa, Artificial Sequence
  Non-cyclic GFR-binding peptide
  MOD_RES (14)..(15): Xaa is C or S
IYLISIPSLDQPVXXP

SEQ ID NO: 2629 - protein, 10 aa, Artificial Sequence
  Non-cyclic GFR-binding peptide
IYLVSIPSLQ

SEQ ID NO: 2630 - protein, 15 aa, Artificial Sequence
  Non-cyclic GFR-binding peptide
  MOD_RES (14)..(15): Xaa is C or S
LYLISIPELAQPVXX

SEQ ID NO: 2631 - protein, 13 aa, Artificial Sequence
  Non-cyclic GFR-binding peptide
IYLISIPSLDQSV

SEQ ID NO: 2632 - protein, 15 aa, Artificial Sequence
  Non-cyclic GFR-binding peptide
  MOD_RES (14)..(15): Xaa is C or S
IYLISIPSLDQSVXX

SEQ ID NO: 2633 - protein, 18 aa, Artificial Sequence
  Non-cyclic GFR-binding peptide
  MOD_RES (14)..(15): Xaa is C or S
KYLISIPSLRAPVXXSAP

SEQ ID NO: 2634 - protein, 20 aa, Artificial Sequence
  Non-cyclic GFR-binding peptide
  MOD_RES (14)..(15): Xaa is C or S
IYLISIPSLDQSVXXPSASA

SEQ ID NO: 2635 - protein, 11 aa, Artificial Sequence
  Non-cyclic GFR-binding peptide
IYLISIPSLAQ

SEQ ID NO: 2636 - protein, 17 aa, Artificial Sequence
  Non-cyclic GFR-binding peptide
  MOD_RES (14)..(14): Xaa is C or S
IYLVSIPSLKTPAXTPK

SEQ ID NO: 2637 - protein, 20 aa, Artificial Sequence
  Non-cyclic GFR-binding peptide
  MOD_RES (14)..(15): Xaa is C or S
LYLVSIPELKTPAXXAKPVA

SEQ ID NO: 2638 - protein, 16 aa, Artificial Sequence
  Non-cyclic GFR-binding peptide
  MOD_RES (14)..(15): Xaa is C or S
IYLVSIPSLQTPAXXP

SEQ ID NO: 2639 - protein, 15 aa, Artificial Sequence
  Non-cyclic GFR-binding peptide
  MOD_RES (14)..(15): Xaa is C or S
IYLISIPSLAQPVXX

SEQ ID NO: 2640 - protein, 18 aa, Artificial Sequence
  Non-cyclic GFR-binding peptide
  MOD_RES (14)..(15): Xaa is C or S
LYLISIPELAQPVXXPAA

SEQ ID NO: 2641 - protein, 12 aa, Artificial Sequence
  Non-cyclic GFR-binding peptide
LYLVSIPELKTP

SEQ ID NO: 2642 - protein, 15 aa, Artificial Sequence
  Non-cyclic GFR-binding peptide
  MOD_RES (14)..(15): Xaa is C or S
IYLISIPSLKTPVXX

SEQ ID NO: 2643 - protein, 15 aa, Artificial Sequence
  Non-cyclic GFR-binding peptide
  MOD_RES (14)..(15): Xaa is C or S
KYLISIPSLKTPVXX

SEQ ID NO: 2644 - protein, 17 aa, Artificial Sequence
  Non-cyclic GFR-binding peptide
  MOD_RES (14)..(15): Xaa is C or S
LYLISIPELDQPVXXPS

SEQ ID NO: 2645 - protein, 14 aa, Artificial Sequence
  Non-cyclic GFR-binding peptide
  MOD_RES (14)..(14): Xaa is C or S
LYLISIPELRAPVX

SEQ ID NO: 2646 - protein, 18 aa, Artificial Sequence
  Non-cyclic GFR-binding peptide
  MOD_RES (14)..(15): Xaa is C or S
IYLISIPSLAQPVXXPAA

SEQ ID NO: 2647 - protein, 14 aa, Artificial Sequence
  Non-cyclic GFR-binding peptide
  MOD_RES (14)..(14): Xaa is C or S
LYLMSIPELETPVX

SEQ ID NO: 2648 - protein, 16 aa, Artificial Sequence
  Non-cyclic GFR-binding peptide
  MOD_RES (14)..(15): Xaa is C or S
LYLISIPELDQSVXXP

SEQ ID NO: 2649 - protein, 14 aa, Artificial Sequence
  Non-cyclic GFR-binding peptide
  MOD_RES (14)..(14): Xaa is C or S
IYLVSIPSLKTPAX

SEQ ID NO: 2650 - protein, 16 aa, Artificial Sequence
  Non-cyclic GFR-binding peptide
  MOD_RES (14)..(15): Xaa is C or S
LYLISIPELAQPVXXP

SEQ ID NO: 2651 - protein, 18 aa, Artificial Sequence
  Non-cyclic GFR-binding peptide
  MOD_RES (14)..(15): Xaa is C or S
IYLVSIPSLQTPAXXPKP

SEQ ID NO: 2652 - protein, 20 aa, Artificial Sequence
  Non-cyclic GFR-binding peptide
  MOD_RES (14)..(15): Xaa is C or S
LYLISIPELDQPVXXPSASA

SEQ ID NO: 2653 - protein, 10 aa, Artificial Sequence
  Non-cyclic GFR-binding peptide
FYLISIANLK

SEQ ID NO: 2654 - protein, 13 aa, Artificial Sequence
  Non-cyclic GFR-binding peptide
IYLVSIPSLQTPA

SEQ ID NO: 2655 - protein, 13 aa, Artificial Sequence
  Non-cyclic GFR-binding peptide
IYLISIPSLKTPV

SEQ ID NO: 2656 - protein, 10 aa, Artificial Sequence
  Non-cyclic GFR-binding peptide
IYLISIPSLA

SEQ ID NO: 2657 - protein, 14 aa, Artificial Sequence
  Non-cyclic GFR-binding peptide
  MOD_RES (14)..(14): Xaa is C or S
LYLVSIPELKTPVX

SEQ ID NO: 2658 - protein, 13 aa, Artificial Sequence
  Non-cyclic GFR-binding peptide
KYLISIPSLKTPV

SEQ ID NO: 2659 - protein, 16 aa, Artificial Sequence
  Non-cyclic GFR-binding peptide
  MOD_RES (14)..(15): Xaa is C or S
LYLVSIPELKTPAXXA

SEQ ID NO: 2660 - protein, 10 aa, Artificial Sequence
  Non-cyclic GFR-binding peptide
KYLISIPSLR

SEQ ID NO: 2661 - protein, 17 aa, Artificial Sequence
  Non-cyclic GFR-binding peptide
  MOD_RES (14)..(15): Xaa is C or S
IYLVSIPSLKTPAXXAK

SEQ ID NO: 2662 - protein, 13 aa, Artificial Sequence
  Non-cyclic GFR-binding peptide
IYLISIPSLAQPV

SEQ ID NO: 2663 - protein, 15 aa, Artificial Sequence
  Non-cyclic GFR-binding peptide
  MOD_RES (14)..(15): Xaa is C or S
IYLVSIPSLQTPAXX

SEQ ID NO: 2664 - protein, 12 aa, Artificial Sequence
  Non-cyclic GFR-binding peptide
IYLISIPSLDQP

SEQ ID NO: 2665 - protein, 15 aa, Artificial Sequence
  Non-cyclic GFR-binding peptide
  MOD_RES (14)..(15): Xaa is C or S
LYLISIPELDQSVXX

SEQ ID NO: 2666 - protein, 14 aa, Artificial Sequence
  Non-cyclic GFR-binding peptide
  MOD_RES (14)..(14): Xaa is C or S
IYLISIPSLDQPVX

SEQ ID NO: 2667 - protein, 13 aa, Artificial Sequence
  Non-cyclic GFR-binding peptide
LYLISIPELDQSV

SEQ ID NO: 2668 - protein, 18 aa, Artificial Sequence
  Non-cyclic GFR-binding peptide
  MOD_RES (14)..(15): Xaa is C or S
LYLISIPELRAPVXXSAP

SEQ ID NO: 2669 - protein, 19 aa, Artificial Sequence
  Non-cyclic GFR-binding peptide
  MOD_RES (14)..(14): Xaa is C or S
IYLVSIPSLKTPAXTPKTV

SEQ ID NO: 2670 - protein, 18 aa, Artificial Sequence
  Non-cyclic GFR-binding peptide
  MOD_RES (14)..(14): Xaa is C or S
IYLVSIPSLKTPAXTPKT

SEQ ID NO: 2671 - protein, 18 aa, Artificial Sequence
  Non-cyclic GFR-binding peptide
  MOD_RES (14)..(15): Xaa is C or S
IYLVSIPSLKTPAXXAKP

SEQ ID NO: 2672 - protein, 10 aa, Artificial Sequence
  Non-cyclic GFR-binding peptide
LYLVSIPELQ

SEQ ID NO: 2673 - protein, 15 aa, Artificial Sequence
  Non-cyclic GFR-binding peptide
  MOD_RES (14)..(15): Xaa is C or S
IYLISIPSLDQPVXX

SEQ ID NO: 2674 - protein, 20 aa, Artificial Sequence
  Non-cyclic GFR-binding peptide
  MOD_RES (14)..(15): Xaa is C or S
IYLISIPSLAQPVXXPAASA

SEQ ID NO: 2675 - protein, 20 aa, Artificial Sequence
  Non-cyclic GFR-binding peptide
  MOD_RES (14)..(15): Xaa is C or S
IYLMSIPSLETPVXXAKPIK

SEQ ID NO: 2676 - protein, 16 aa, Artificial Sequence
  Non-cyclic GFR-binding peptide
  MOD_RES (14)..(15): Xaa is C or S
IYLVSIPSLKTPVXXA

SEQ ID NO: 2677 - protein, 18 aa, Artificial Sequence
  Non-cyclic GFR-binding peptide
  MOD_RES (14)..(15): Xaa is C or S
FYLISIANLKTPVXXAKS

SEQ ID NO: 2678 - protein, 12 aa, Artificial Sequence
  Non-cyclic GFR-binding peptide
IYLISIPSLDQS

SEQ ID NO: 2679 - protein, 19 aa, Artificial Sequence
  Non-cyclic GFR-binding peptide
  MOD_RES (14)..(15): Xaa is C or S
LYLISIPELDQSVXXPSAS

SEQ ID NO: 2680 - protein, 17 aa, Artificial Sequence
  Non-cyclic GFR-binding peptide
  MOD_RES (14)..(15): Xaa is C or S
IYLVSIPSLKTPAXXPK

SEQ ID NO: 2681 - protein, 12 aa, Artificial Sequence
  Non-cyclic GFR-binding peptide
LYLMSIPELETP

SEQ ID NO: 2682 - protein, 17 aa, Artificial Sequence
  Non-cyclic GFR-binding peptide
  MOD_RES (14)..(15): Xaa is C or S
IYLVSIPSLQTPAXXPK

SEQ ID NO: 2683 - protein, 14 aa, Artificial Sequence
  Non-cyclic GFR-binding peptide
  MOD_RES (14)..(14): Xaa is C or S
FYLISIANLRAPVX

SEQ ID NO: 2684 - protein, 14 aa, Artificial Sequence
  Non-cyclic GFR-binding peptide
  MOD_RES (14)..(14): Xaa is C or S
IYLISIPSLAQPVX

SEQ ID NO: 2685 - protein, 19 aa, Artificial Sequence
  Non-cyclic GFR-binding peptide
  MOD_RES (14)..(15): Xaa is C or S
IYLVSIPSLKTPVXXAKGV

SEQ ID NO: 2686 - protein, 18 aa, Artificial Sequence
  Non-cyclic GFR-binding peptide
  MOD_RES (14)..(15): Xaa is C or S
IYLVSIPSLKTPAXXPKP

SEQ ID NO: 2687 - protein, 19 aa, Artificial Sequence
  Non-cyclic GFR-binding peptide
  MOD_RES (14)..(15): Xaa is C or S
LYLMSIPELETPVXXAKPI

SEQ ID NO: 2688 - protein, 10 aa, Artificial Sequence
  Non-cyclic GFR-binding peptide
IYLISIPSLD

SEQ ID NO: 2689 - protein, 20 aa, Artificial Sequence
  Non-cyclic GFR-binding peptide
  MOD_RES (14)..(14): Xaa is C or S
IYLVSIPSLKTPAXTPKTVH

SEQ ID NO: 2690 - protein, 13 aa, Artificial Sequence
  Non-cyclic GFR-binding peptide
IYLVSIPSLKTPA

SEQ ID NO: 2691 - protein, 20 aa, Artificial Sequence
  Non-cyclic GFR-binding peptide
  MOD_RES (14)..(15): Xaa is C or S
LYLVSIPELKTPAXXPKPVY

SEQ ID NO: 2692 - protein, 11 aa, Artificial Sequence
  Non-cyclic GFR-binding peptide
KYLISIPSLKT

SEQ ID NO: 2693 - protein, 17 aa, Artificial Sequence
  Non-cyclic GFR-binding peptide
  MOD_RES (14)..(15): Xaa is C or S
KYLISIPSLKTPVXXAK

SEQ ID NO: 2694 - protein, 17 aa, Artificial Sequence
  Non-cyclic GFR-binding peptide
  MOD_RES (14)..(15): Xaa is C or S
IYLISIPSLKTPVXXAK

SEQ ID NO: 2695 - protein, 12 aa, Artificial Sequence
  Non-cyclic GFR-binding peptide
LYLVSIPELQTP

SEQ ID NO: 2696 - protein, 11 aa, Artificial Sequence
  Non-cyclic GFR-binding peptide
IYLISIPSLKT

SEQ ID NO: 2697 - protein, 10 aa, Artificial Sequence
  Non-cyclic GFR-binding peptide
LYLVSIPELK

SEQ ID NO: 2698 - protein, 10 aa, Artificial Sequence
  Non-cyclic GFR-binding peptide
ELSPISMLYI

SEQ ID NO: 2699 - protein, 18 aa, Artificial Sequence
  Non-cyclic GFR-binding peptide
  MOD_RES (4)..(5): Xaa is C or S
ASPXXVSQDLSPISILYI

SEQ ID NO: 2700 - protein, 13 aa, Artificial Sequence
  Non-cyclic GFR-binding peptide
VPQDLEPISILYL

SEQ ID NO: 2701 - protein, 14 aa, Artificial Sequence
  Non-cyclic GFR-binding peptide
  MOD_RES (1)..(1): Xaa is C or S
XVPTKLNAISILYF

SEQ ID NO: 2702 - protein, 13 aa, Artificial Sequence
  Non-cyclic GFR-binding peptide
VPTELEPISMLYL

SEQ ID NO: 2703 - protein, 15 aa, Artificial Sequence
  Non-cyclic GFR-binding peptide
  MOD_RES (1)..(2): Xaa is C or S
XXAPTKLEPISVLYL

SEQ ID NO: 2704 - protein, 19 aa, Artificial Sequence
  Non-cyclic GFR-binding peptide
  MOD_RES (5)..(6): Xaa is C or S
APASXXVPARLSPISILYK

SEQ ID NO: 2705 - protein, 14 aa, Artificial Sequence
  Non-cyclic GFR-binding peptide
  MOD_RES (1)..(1): Xaa is C or S
XVSQDLEPISILYL

SEQ ID NO: 2706 - protein, 16 aa, Artificial Sequence
  Non-cyclic GFR-binding peptide
  MOD_RES (3)..(3): Xaa is C or S
PTXAPTKLEPISVLYL

SEQ ID NO: 2707 - protein, 19 aa, Artificial Sequence
  Non-cyclic GFR-binding peptide
  MOD_RES (5)..(6): Xaa is C or S
VPKPXXAPTKLEPISVLYL

SEQ ID NO: 2708 - protein, 10 aa, Artificial Sequence
  Non-cyclic GFR-binding peptide
DLEPISILYL

SEQ ID NO: 2709 - protein, 17 aa, Artificial Sequence
  Non-cyclic GFR-binding peptide
  MOD_RES (3)..(4): Xaa is C or S
ASXXVPARLEPISILYL

SEQ ID NO: 2710 - protein, 12 aa, Artificial Sequence
  Non-cyclic GFR-binding peptide
PQALSPISILYI

SEQ ID NO: 2711 - protein, 12 aa, Artificial Sequence
  Non-cyclic GFR-binding peptide
PARLNAISILYF

SEQ ID NO: 2712 - protein, 18 aa, Artificial Sequence
  Non-cyclic GFR-binding peptide
  MOD_RES (4)..(5): Xaa is C or S
PKAXXVPTELSPISMLYI

SEQ ID NO: 2713 - protein, 14 aa, Artificial Sequence
  Non-cyclic GFR-binding peptide
  MOD_RES (1)..(1): Xaa is C or S
XVPTKLSPISILYI

SEQ ID NO: 2714 - protein, 14 aa, Artificial Sequence
  Non-cyclic GFR-binding peptide
  MOD_RES (1)..(1): Xaa is C or S
XVPTKLSPISILYK

SEQ ID NO: 2715 - protein, 19 aa, Artificial Sequence
  Non-cyclic GFR-binding peptide
  MOD_RES (5)..(6): Xaa is C or S
VGKAXXVPTKLEPISVLYL

SEQ ID NO: 2716 - protein, 16 aa, Artificial Sequence
  Non-cyclic GFR-binding peptide
  MOD_RES (2)..(3): Xaa is C or S
PXXVPQDLEPISILYL

SEQ ID NO: 2717 - protein, 17 aa, Artificial Sequence
  Non-cyclic GFR-binding peptide
  MOD_RES (3)..(4): Xaa is C or S
SPXXVSQDLEPISILYL

SEQ ID NO: 2718 - protein, 16 aa, Artificial Sequence
  Non-cyclic GFR-binding peptide
  MOD_RES (2)..(3): Xaa is C or S
SXXVPARLNAISILYF

SEQ ID NO: 2719 - protein, 9 aa, Artificial Sequence
  Non-cyclic GFR-binding peptide
LEPISVLYL

SEQ ID NO: 2720 - protein, 19 aa, Artificial Sequence
  Non-cyclic GFR-binding peptide
  MOD_RES (5)..(6): Xaa is C or S
APASXXVPARLNAISILYF

SEQ ID NO: 2721 - protein, 20 aa, Artificial Sequence
  Non-cyclic GFR-binding peptide
  MOD_RES (6)..(7): Xaa is C or S
ASASPXXVSQDLEPISILYL

SEQ ID NO: 2722 - protein, 12 aa, Artificial Sequence
  Non-cyclic GFR-binding peptide
PTQLSPISVLYI

SEQ ID NO: 2723 - protein, 17 aa, Artificial Sequence
  Non-cyclic GFR-binding peptide
  MOD_RES (4)..(4): Xaa is C or S
KPTXAPTKLEPISVLYL

SEQ ID NO: 2724 - protein, 10 aa, Artificial Sequence
  Non-cyclic GFR-binding peptide
KLSPISVLYI

SEQ ID NO: 2725 - protein, 11 aa, Artificial Sequence
  Non-cyclic GFR-binding peptide
QALEPISILYL

SEQ ID NO: 2726 - protein, 16 aa, Artificial Sequence
  Non-cyclic GFR-binding peptide
  MOD_RES (2)..(3): Xaa is C or S
SXXVPARLSPISILYK

SEQ ID NO: 2727 - protein, 17 aa, Artificial Sequence
  Non-cyclic GFR-binding peptide
  MOD_RES (3)..(4): Xaa is C or S
KAXXAPTKLEPISVLYL

SEQ ID NO: 2728 - protein, 10 aa, Artificial Sequence
  Non-cyclic GFR-binding peptide
RLEPISILYL

SEQ ID NO: 2729 - protein, 13 aa, Artificial Sequence
  Non-cyclic GFR-binding peptide
VPARLNAISILYF

SEQ ID NO: 2730 - protein, 20 aa, Artificial Sequence
  Non-cyclic GFR-binding peptide
  MOD_RES (6)..(7): Xaa is C or S
SIPKAXXVPTELEPISMLYL

SEQ ID NO: 2731 - protein, 20 aa, Artificial Sequence
  Non-cyclic GFR-binding peptide
  MOD_RES (6)..(7): Xaa is C or S
AAPASXXVPARLEPISILYL

SEQ ID NO: 2732 - protein, 20 aa, Artificial Sequence
  Non-cyclic GFR-binding peptide
  MOD_RES (7)..(7): Xaa is C or S
HVTKPTXAPTKLEPISVLYL

SEQ ID NO: 2733 - protein, 15 aa, Artificial Sequence
  Non-cyclic GFR-binding peptide
  MOD_RES (1)..(2): Xaa is C or S
XXVPARLSPISILYK

SEQ ID NO: 2734 - protein, 15 aa, Artificial Sequence
  Non-cyclic GFR-binding peptide
  MOD_RES (1)..(2): Xaa is C or S
XXVPTELEPISMLYL

SEQ ID NO: 2735 - protein, 15 aa, Artificial Sequence
  Non-cyclic GFR-binding peptide
  MOD_RES (2)..(2): Xaa is C or S
TXAPTKLEPISVLYL

SEQ ID NO: 2736 - protein, 15 aa, Artificial Sequence
  Non-cyclic GFR-binding peptide
  MOD_RES (1)..(2): Xaa is C or S
XXVPQDLEPISILYL

SEQ ID NO: 2737 - protein, 14 aa, Artificial Sequence
  Non-cyclic GFR-binding peptide
  MOD_RES (1)..(1): Xaa is C or S
XAPTQLEPISVLYL

SEQ ID NO: 2738 - protein, 11 aa, Artificial Sequence
  Non-cyclic GFR-binding peptide
QDLSPISILYI

SEQ ID NO: 2739 - protein, 18 aa, Artificial Sequence
  Non-cyclic GFR-binding peptide
  MOD_RES (4)..(5): Xaa is C or S
PASXXVPARLNAISILYF

SEQ ID NO: 2740 - protein, 19 aa, Artificial Sequence
  Non-cyclic GFR-binding peptide
  MOD_RES (5)..(6): Xaa is C or S
SAAPXXVPQALEPISILYL

SEQ ID NO: 2741 - protein, 11 aa, Artificial Sequence
  Non-cyclic GFR-binding peptide
TQLEPISVLYL

SEQ ID NO: 2742 - protein, 13 aa, Artificial Sequence
  Non-cyclic GFR-binding peptide
VPTKLEPISVLYL

SEQ ID NO: 2743 - protein, 11 aa, Artificial Sequence
  Non-cyclic GFR-binding peptide
TELSPISMLYI

SEQ ID NO: 2744 - protein, 13 aa, Artificial Sequence
  Non-cyclic GFR-binding peptide
VPARLSPISILYK

SEQ ID NO: 2745 - protein, 11 aa, Artificial Sequence
  Non-cyclic GFR-binding peptide
TKLSPISVLYI

SEQ ID NO: 2746 - protein, 16 aa, Artificial Sequence
  Non-cyclic GFR-binding peptide
  MOD_RES (2)..(3): Xaa is C or S
PXXAPTKLEPISVLYL

SEQ ID NO: 2747 - protein, 17 aa, Artificial Sequence
  Non-cyclic GFR-binding peptide
  MOD_RES (3)..(4): Xaa is C or S
KAXXVPTELSPISMLYI

SEQ ID NO: 2748 - protein, 15 aa, Artificial Sequence
  Non-cyclic GFR-binding peptide
  MOD_RES (1)..(2): Xaa is C or S
XXVPTKLEPISVLYL

SEQ ID NO: 2749 - protein, 17 aa, Artificial Sequence
  Non-cyclic GFR-binding peptide
  MOD_RES (3)..(4): Xaa is C or S
APXXVPQALSPISILYI

SEQ ID NO: 2750 - protein, 15 aa, Artificial Sequence
  Non-cyclic GFR-binding peptide
  MOD_RES (1)..(2): Xaa is C or S
XXVPARLNAISILYF

SEQ ID NO: 2751 - protein, 9 aa, Artificial Sequence
  Non-cyclic GFR-binding peptide
LEPISMLYL

SEQ ID NO: 2752 - protein, 18 aa, Artificial Sequence
  Non-cyclic GFR-binding peptide
  MOD_RES (4)..(5): Xaa is C or S
GKAXXVPTKLSPISVLYI

SEQ ID NO: 2753 - protein, 19 aa, Artificial Sequence
  Non-cyclic GFR-binding peptide
  MOD_RES (5)..(6): Xaa is C or S
SASPXXVPQDLEPISILYL

SEQ ID NO: 2754 - protein, 20 aa, Artificial Sequence
  Non-cyclic GFR-binding peptide
  MOD_RES (6)..(7): Xaa is C or S
KVGKAXXVPTKLEPISVLYL

SEQ ID NO: 2755 - protein, 20 aa, Artificial Sequence
  Non-cyclic GFR-binding peptide
  MOD_RES (6)..(7): Xaa is C or S
TVPKPXXAPTQLSPISVLYI

SEQ ID NO: 2756 - protein, 17 aa, Artificial Sequence
  Non-cyclic GFR-binding peptide
  MOD_RES (3)..(4): Xaa is C or S
APXXVPQALEPISILYL

SEQ ID NO: 2757 - protein, 18 aa, Artificial Sequence
  Non-cyclic GFR-binding peptide
  MOD_RES (4)..(5): Xaa is C or S
ASPXXVPQDLSPISILYI

SEQ ID NO: 2758 - protein, 14 aa, Artificial Sequence
  Non-cyclic GFR-binding peptide
  MOD_RES (1)..(1): Xaa is C or S
XVPTKLSPISVLYI

SEQ ID NO: 2759 - protein, 17 aa, Artificial Sequence
  Non-cyclic GFR-binding peptide
  MOD_RES (3)..(4): Xaa is C or S
SPXXVPQDLSPISILYI

SEQ ID NO: 2760 - protein, 16 aa, Artificial Sequence
  Non-cyclic GFR-binding peptide
  MOD_RES (2)..(3): Xaa is C or S
PXXVPQALSPISILYI

SEQ ID NO: 2761 - protein, 20 aa, Artificial Sequence
  Non-cyclic GFR-binding peptide
  MOD_RES (6)..(7): Xaa is C or S
AVPKAXXAPTKLSPISVLYI

SEQ ID NO: 2762 - protein, 16 aa, Artificial Sequence
  Non-cyclic GFR-binding peptide
  MOD_RES (2)..(3): Xaa is C or S
PXXAPTQLEPISVLYL

SEQ ID NO: 2763 - protein, 20 aa, Artificial Sequence
  Non-cyclic GFR-binding peptide
  MOD_RES (6)..(7): Xaa is C or S
TVPKPXXAPTQLEPISVLYL

SEQ ID NO: 2764 - protein, 19 aa, Artificial Sequence
  Non-cyclic GFR-binding peptide
  MOD_RES (5)..(6): Xaa is C or S
VPKPXXAPTQLEPISVLYL

SEQ ID NO: 2765 - protein, 19 aa, Artificial Sequence
  Non-cyclic GFR-binding peptide
  MOD_RES (5)..(6): Xaa is C or S
SASPXXVSQDLSPISILYI

SEQ ID NO: 2766 - protein, 17 aa, Artificial Sequence
  Non-cyclic GFR-binding peptide
  MOD_RES (3)..(4): Xaa is C or S
KPXXAPTKLEPISVLYL

SEQ ID NO: 2767 - protein, 11 aa, Artificial Sequence
  Non-cyclic GFR-binding peptide
TKLEPISVLYL

SEQ ID NO: 2768 - protein, 18 aa, Artificial Sequence
  Non-cyclic GFR-binding peptide
  MOD_RES (4)..(5): Xaa is C or S
ASPXXVPQDLEPISILYL

SEQ ID NO: 2769 - protein, 20 aa, Artificial Sequence
  Non-cyclic GFR-binding peptide
  MOD_RES (6)..(7): Xaa is C or S
ASAAPXXVPQALEPISILYL

SEQ ID NO: 2770 - protein, 13 aa, Artificial Sequence
  Non-cyclic GFR-binding peptide
VPTKLNAISILYF

SEQ ID NO: 2771 - protein, 20 aa, Artificial Sequence
  Non-cyclic GFR-binding peptide
  MOD_RES (6)..(7): Xaa is C or S
KVGKAXXVPTKLSPISVLYI

SEQ ID NO: 2772 - protein, 15 aa, Artificial Sequence
  Non-cyclic GFR-binding peptide
  MOD_RES (1)..(2): Xaa is C or S
XXVPTKLNAISILYF

SEQ ID NO: 2773 - protein, 17 aa, Artificial Sequence
  Non-cyclic GFR-binding peptide
  MOD_RES (3)..(4): Xaa is C or S
KAXXVPTELEPISMLYL

SEQ ID NO: 2774 - protein, 12 aa, Artificial Sequence
  Non-cyclic GFR-binding peptide
PARLSPISILYK

SEQ ID NO: 2775 - protein, 15 aa, Artificial Sequence
  Non-cyclic GFR-binding peptide
  MOD_RES (2)..(2): Xaa is C or S
TXAPTKLSPISVLYI

SEQ ID NO: 2776 - protein, 12 aa, Artificial Sequence
  Non-cyclic GFR-binding peptide
PTELSPISMLYI

SEQ ID NO: 2777 - protein, 9 aa, Artificial Sequence
  Non-cyclic GFR-binding peptide
LSPISMLYI

SEQ ID NO: 2778 - protein, 13 aa, Artificial Sequence
  Non-cyclic GFR-binding peptide
APTKLEPISVLYL

SEQ ID NO: 2779 - protein, 10 aa, Artificial Sequence
  Non-cyclic GFR-binding peptide
KLSPISILYK

SEQ ID NO: 2780 - protein, 10 aa, Artificial Sequence
  Non-cyclic GFR-binding peptide
KLSPISILYI

SEQ ID NO: 2781 - protein, 11 aa, Artificial Sequence
  Non-cyclic GFR-binding peptide
ARLEPISILYL

SEQ ID NO: 2782 - protein, 15 aa, Artificial Sequence
  Non-cyclic GFR-binding peptide
  MOD_RES (1)..(2): Xaa is C or S
XXVPTELSPISMLYI

SEQ ID NO: 2783 - protein, 20 aa, Artificial Sequence
  Non-cyclic GFR-binding peptide
  MOD_RES (6)..(7): Xaa is C or S
ASASPXXVPQDLSPISILYI

SEQ ID NO: 2784 - protein, 17 aa, Artificial Sequence
  Non-cyclic GFR-binding peptide
  MOD_RES (3)..(4): Xaa is C or S
KAXXVPTKLEPISVLYL

SEQ ID NO: 2785 - protein, 14 aa, Artificial Sequence
  Non-cyclic GFR-binding peptide
  MOD_RES (1)..(1): Xaa is C or S
XVPQALEPISILYL

SEQ ID NO: 2786 - protein, 14 aa, Artificial Sequence
  Non-cyclic GFR-binding peptide
  MOD_RES (1)..(1): Xaa is C or S
XVPTELSPISMLYI

SEQ ID NO: 2787 - protein, 16 aa, Artificial Sequence
  Non-cyclic GFR-binding peptide
  MOD_RES (2)..(3): Xaa is C or S
PXXVSQDLSPISILYI

SEQ ID NO: 2788 - protein, 14 aa, Artificial Sequence
  Non-cyclic GFR-binding peptide
  MOD_RES (1)..(1): Xaa is C or S
XAPTKLEPISVLYL

SEQ ID NO: 2789 - protein, 18 aa, Artificial Sequence
  Non-cyclic GFR-binding peptide
  MOD_RES (5)..(5): Xaa is C or S
TKPTXAPTKLEPISVLYL

SEQ ID NO: 2790 - protein, 18 aa, Artificial Sequence
  Non-cyclic GFR-binding peptide
  MOD_RES (4)..(5): Xaa is C or S
SKAXXVPTKLSPISILYK

SEQ ID NO: 2791 - protein, 18 aa, Artificial Sequence
  Non-cyclic GFR-binding peptide
  MOD_RES (4)..(5): Xaa is C or S
SKAXXVPTKLSPISILYI

SEQ ID NO: 2792 - protein, 17 aa, Artificial Sequence
  Non-cyclic GFR-binding peptide
  MOD_RES (3)..(4): Xaa is C or S
KPXXAPTQLEPISVLYL

SEQ ID NO: 2793 - protein, 12 aa, Artificial Sequence
  Non-cyclic GFR-binding peptide
PQDLEPISILYL

SEQ ID NO: 2794 - protein, 14 aa, Artificial Sequence
  Non-cyclic GFR-binding peptide
  MOD_RES (1)..(1): Xaa is C or S
XVPARLSPISILYK

SEQ ID NO: 2795 - protein, 12 aa, Artificial Sequence
  Non-cyclic GFR-binding peptide
PTKLSPISVLYI

SEQ ID NO: 2796 - protein, 20 aa, Artificial Sequence
  Non-cyclic GFR-binding peptide
  MOD_RES (6)..(7): Xaa is C or S
KIPKAXXVPTELEPISMLYL

SEQ ID NO: 2797 - protein, 16 aa, Artificial Sequence
  Non-cyclic GFR-binding peptide
  MOD_RES (2)..(3): Xaa is C or S
AXXVPTKLEPISVLYL

SEQ ID NO: 2798 - protein, 16 aa, Artificial Sequence
  Non-cyclic GFR-binding peptide
  MOD_RES (2)..(3): Xaa is C or S
AXXVPTELEPISMLYL

SEQ ID NO: 2799 - protein, 17 aa, Artificial Sequence
  Non-cyclic GFR-binding peptide
  MOD_RES (3)..(4): Xaa is C or S
KAXXVPTKLNAISILYF

SEQ ID NO: 2800 - protein, 18 aa, Artificial Sequence
  Non-cyclic GFR-binding peptide
  MOD_RES (4)..(5): Xaa is C or S
PKPXXAPTQLEPISVLYL

SEQ ID NO: 2801 - protein, 20 aa, Artificial Sequence
  Non-cyclic GFR-binding peptide
  MOD_RES (6)..(7): Xaa is C or S
AAPASXXVPARLSPISILYK

SEQ ID NO: 2802 - protein, 14 aa, Artificial Sequence
  Non-cyclic GFR-binding peptide
  MOD_RES (1)..(1): Xaa is C or S
XVPQDLEPISILYL

SEQ ID NO: 2803 - protein, 13 aa, Artificial Sequence
  Non-cyclic GFR-binding peptide
APTQLEPISVLYL

SEQ ID NO: 2804 - protein, 16 aa, Artificial Sequence
  Non-cyclic GFR-binding peptide
  MOD_RES (2)..(3): Xaa is C or S
SXXVPARLEPISILYL

SEQ ID NO: 2805 - protein, 15 aa, Artificial Sequence
  Non-cyclic GFR-binding peptide
  MOD_RES (1)..(2): Xaa is C or S
XXAPTQLEPISVLYL

SEQ ID NO: 2806 - protein, 19 aa, Artificial Sequence
  Non-cyclic GFR-binding peptide
  MOD_RES (5)..(6): Xaa is C or S
VPKAXXAPTKLEPISVLYL

SEQ ID NO: 2807 - protein, 11 aa, Artificial Sequence
  Non-cyclic GFR-binding peptide
TKLNAISILYF

SEQ ID NO: 2808 - protein, 19 aa, Artificial Sequence
  Non-cyclic GFR-binding peptide
  MOD_RES (6)..(6): Xaa is C or S
VTKPTXAPTKLEPISVLYL

SEQ ID NO: 2809 - protein, 12 aa, Artificial Sequence
  Non-cyclic GFR-binding peptide
PTKLSPISILYI

SEQ ID NO: 2810 - protein, 17 aa, Artificial Sequence
  Non-cyclic GFR-binding peptide
  MOD_RES (3)..(4): Xaa is C or S
SPXXVSQDLSPISILYI

SEQ ID NO: 2811 - protein, 20 aa, Artificial Sequence
  Non-cyclic GFR-binding peptide
  MOD_RES (6)..(7): Xaa is C or S
KASKAXXVPTKLSPISILYK

SEQ ID NO: 2812 - protein, 20 aa, Artificial Sequence
  Non-cyclic GFR-binding peptide
  MOD_RES (6)..(7): Xaa is C or S
KASKAXXVPTKLSPISILYI

SEQ ID NO: 2813 - protein, 13 aa, Artificial Sequence
  Non-cyclic GFR-binding peptide
VPARLEPISILYL

SEQ ID NO: 2814 - protein, 15 aa, Artificial Sequence
  Non-cyclic GFR-binding peptide
  MOD_RES (1)..(2): Xaa is C or S
XXAPTKLSPISVLYI

SEQ ID NO: 2815 - protein, 20 aa, Artificial Sequence
  Non-cyclic GFR-binding peptide
  MOD_RES (6)..(7): Xaa is C or S
AAPASXXVPARLNAISILYF

SEQ ID NO: 2816 - protein, 19 aa, Artificial Sequence
  Non-cyclic GFR-binding peptide
  MOD_RES (5)..(6): Xaa is C or S
APASXXVPARLEPISILYL

SEQ ID NO: 2817 - protein, 16 aa, Artificial Sequence
  Non-cyclic GFR-binding peptide
  MOD_RES (2)..(3): Xaa is C or S
PXXAPTKLSPISVLYI

SEQ ID NO: 2818 - protein, 19 aa, Artificial Sequence
  Non-cyclic GFR-binding peptide
  MOD_RES (5)..(6): Xaa is C or S
SAAPXXVPQALSPISILYI

SEQ ID NO: 2819 - protein, 18 aa, Artificial Sequence
  Non-cyclic GFR-binding peptide
  MOD_RES (4)..(5): Xaa is C or S
PKAXXVPTELEPISMLYL

SEQ ID NO: 2820 - protein, 18 aa, Artificial Sequence
  Non-cyclic GFR-binding peptide
  MOD_RES (4)..(5): Xaa is C or S
ASPXXVSQDLEPISILYL

SEQ ID NO: 2821 - protein, 19 aa, Artificial Sequence
  Non-cyclic GFR-binding peptide
  MOD_RES (5)..(6): Xaa is C or S
IPKAXXVPTELSPISMLYI

SEQ ID NO: 2822 - protein, 13 aa, Artificial Sequence
  Non-cyclic GFR-binding peptide
VPQDLSPISILYI

SEQ ID NO: 2823 - protein, 10 aa, Artificial Sequence
  Non-cyclic GFR-binding peptide
ELEPISMLYL

SEQ ID NO: 2824 - protein, 17 aa, Artificial Sequence
  Non-cyclic GFR-binding peptide
  MOD_RES (3)..(4): Xaa is C or S
ASXXVPARLSPISILYK

SEQ ID NO: 2825 - protein, 14 aa, Artificial Sequence
  Non-cyclic GFR-binding peptide
  MOD_RES (1)..(1): Xaa is C or S
XAPTQLSPISVLYI

SEQ ID NO: 2826 - protein, 12 aa, Artificial Sequence
  Non-cyclic GFR-binding peptide
PQALEPISILYL

SEQ ID NO: 2827 - protein, 12 aa, Artificial Sequence
  Non-cyclic GFR-binding peptide
PTKLSPISILYK

SEQ ID NO: 2828 - protein, 16 aa, Artificial Sequence
  Non-cyclic GFR-binding peptide
  MOD_RES (2)..(3): Xaa is C or S
AXXVPTELSPISMLYI

SEQ ID NO: 2829 - protein, 15 aa, Artificial Sequence
  Non-cyclic GFR-binding peptide
  MOD_RES (1)..(2): Xaa is C or S
XXVPTKLSPISVLYI

SEQ ID NO: 2830 - protein, 11 aa, Artificial Sequence
  Non-cyclic GFR-binding peptide
ARLSPISILYK

SEQ ID NO: 2831 - protein, 14 aa, Artificial Sequence
  Non-cyclic GFR-binding peptide
  MOD_RES (1)..(1): Xaa is C or S
XVSQDLSPISILYI

SEQ ID NO: 2832 - protein, 13 aa, Artificial Sequence
  Non-cyclic GFR-binding peptide
VPTELSPISMLYI

SEQ ID NO: 2833 - protein, 18 aa, Artificial Sequence
  Non-cyclic GFR-binding peptide
  MOD_RES (4)..(5): Xaa is C or S
PKPXXAPTKLEPISVLYL

SEQ ID NO: 2834 - protein, 20 aa, Artificial Sequence
  Non-cyclic GFR-binding peptide
  MOD_RES (6)..(7): Xaa is C or S
SIPKAXXVPTELSPISMLYI

SEQ ID NO: 2835 - protein, 13 aa, Artificial Sequence
  Non-cyclic GFR-binding peptide
VPTKLSPISVLYI

SEQ ID NO: 2836 - protein, 19 aa, Artificial Sequence
  Non-cyclic GFR-binding peptide
  MOD_RES (5)..(6): Xaa is C or S
VPKAXXAPTKLSPISVLYI

SEQ ID NO: 2837 - protein, 18 aa, Artificial Sequence
  Non-cyclic GFR-binding peptide
  MOD_RES (4)..(5): Xaa is C or S
GKAXXVPTKLEPISVLYL

SEQ ID NO: 2838 - protein, 11 aa, Artificial Sequence
  Non-cyclic GFR-binding peptide
ARLNAISILYF

SEQ ID NO: 2839 - protein, 19 aa, Artificial Sequence
  Non-cyclic GFR-binding peptide
  MOD_RES (5)..(6): Xaa is C or S
SASPXXVPQDLSPISILYI

SEQ ID NO: 2840 - protein, 16 aa, Artificial Sequence
  Non-cyclic GFR-binding peptide
  MOD_RES (2)..(3): Xaa is C or S
AXXVPTKLSPISILYI

SEQ ID NO: 2841 - protein, 20 aa, Artificial Sequence
  Non-cyclic GFR-binding peptide
  MOD_RES (6)..(7): Xaa is C or S
KASKAXXVPTKLNAISILYF

SEQ ID NO: 2842 - protein, 16 aa, Artificial Sequence
  Non-cyclic GFR-binding peptide
  MOD_RES (2)..(3): Xaa is C or S
AXXVPTKLSPISILYK

SEQ ID NO: 2843 - protein, 20 aa, Artificial Sequence
  Non-cyclic GFR-binding peptide
  MOD_RES (6)..(7): Xaa is C or S
YVPKPXXAPTKLSPISVLYI

SEQ ID NO: 2844 - protein, 13 aa, Artificial Sequence
  Non-cyclic GFR-binding peptide
VPQALEPISILYL

SEQ ID NO: 2845 - protein, 16 aa, Artificial Sequence
  Non-cyclic GFR-binding peptide
  MOD_RES (2)..(3): Xaa is C or S
AXXVPTKLNAISILYF

SEQ ID NO: 2846 - protein, 11 aa, Artificial Sequence
  Non-cyclic GFR-binding peptide
TELEPISMLYL

SEQ ID NO: 2847 - protein, 15 aa, Artificial Sequence
  Non-cyclic GFR-binding peptide
  MOD_RES (1)..(2): Xaa is C or S
XXVPARLEPISILYL

SEQ ID NO: 2848 - protein, 12 aa, Artificial Sequence
  Non-cyclic GFR-binding peptide
PARLEPISILYL

SEQ ID NO: 2849 - protein, 18 aa, Artificial Sequence
  Non-cyclic GFR-binding peptide
  MOD_RES (4)..(5): Xaa is C or S
PKAXXAPTKLEPISVLYL

SEQ ID NO: 2850 - protein, 11 aa, Artificial Sequence
  Non-cyclic GFR-binding peptide
TQLSPISVLYI

SEQ ID NO: 2851 - protein, 19 aa, Artificial Sequence
  Non-cyclic GFR-binding peptide
  MOD_RES (5)..(6): Xaa is C or S
ASKAXXVPTKLSPISILYK

SEQ ID NO: 2852 - protein, 19 aa, Artificial Sequence
  Non-cyclic GFR-binding peptide
  MOD_RES (5)..(6): Xaa is C or S
ASKAXXVPTKLSPISILYI

SEQ ID NO: 2853 - protein, 17 aa, Artificial Sequence
  Non-cyclic GFR-binding peptide
  MOD_RES (3)..(4): Xaa is C or S
ASXXVPARLNAISILYF

SEQ ID NO: 2854 - protein, 19 aa, Artificial Sequence
  Non-cyclic GFR-binding peptide
  MOD_RES (5)..(6): Xaa is C or S
VPKPXXAPTQLSPISVLYI

SEQ ID NO: 2855 - protein, 11 aa, Artificial Sequence
  Non-cyclic GFR-binding peptide
QDLEPISILYL

SEQ ID NO: 2856 - protein, 19 aa, Artificial Sequence
  Non-cyclic GFR-binding peptide
  MOD_RES (5)..(6): Xaa is C or S
ASKAXXVPTKLNAISILYF

SEQ ID NO: 2857 - protein, 12 aa, Artificial Sequence
  Non-cyclic GFR-binding peptide
SQDLEPISILYL

SEQ ID NO: 2858 - protein, 16 aa, Artificial Sequence
  Non-cyclic GFR-binding peptide
  MOD_RES (2)..(3): Xaa is C or S
AXXAPTKLSPISVLYI

SEQ ID NO: 2859 - protein, 9 aa, Artificial Sequence
  Non-cyclic GFR-binding peptide
LSPISVLYI

SEQ ID NO: 2860 - protein, 12 aa, Artificial Sequence
  Non-cyclic GFR-binding peptide
PTKLNAISILYF

SEQ ID NO: 2861 - protein, 16 aa, Artificial Sequence
  Non-cyclic GFR-binding peptide
  MOD_RES (3)..(3): Xaa is C or S
PTXAPTKLSPISVLYI

SEQ ID NO: 2862 - protein, 17 aa, Artificial Sequence
  Non-cyclic GFR-binding peptide
  MOD_RES (3)..(4): Xaa is C or S
KAXXVPTKLSPISVLYI

SEQ ID NO: 2863 - protein, 19 aa, Artificial Sequence
  Non-cyclic GFR-binding peptide
  MOD_RES (5)..(6): Xaa is C or S
VPKPXXAPTKLSPISVLYI

SEQ ID NO: 2864 - protein, 10 aa, Artificial Sequence
  Non-cyclic GFR-binding peptide
ALEPISILYL

SEQ ID NO: 2865 - protein, 16 aa, Artificial Sequence
  Non-cyclic GFR-binding peptide
  MOD_RES (2)..(3): Xaa is C or S
PXXVPQDLSPISILYI

SEQ ID NO: 2866 - protein, 10 aa, Artificial Sequence
  Non-cyclic GFR-binding peptide
QLSPISVLYI

SEQ ID NO: 2867 - protein, 15 aa, Artificial Sequence
  Non-cyclic GFR-binding peptide
  MOD_RES (1)..(2): Xaa is C or S
XXVPQALEPISILYL

SEQ ID NO: 2868 - protein, 13 aa, Artificial Sequence
  Non-cyclic GFR-binding peptide
VSQDLSPISILYI

SEQ ID NO: 2869 - protein, 15 aa, Artificial Sequence
  Non-cyclic GFR-binding peptide
  MOD_RES (1)..(2): Xaa is C or S
XXVSQDLSPISILYI

SEQ ID NO: 2870 - protein, 18 aa, Artificial Sequence
  Non-cyclic GFR-binding peptide
  MOD_RES (4)..(5): Xaa is C or S
PASXXVPARLSPISILYK

SEQ ID NO: 2871 - protein, 20 aa, Artificial Sequence
  Non-cyclic GFR-binding peptide
  MOD_RES (6)..(7): Xaa is C or S
ASASPXXVSQDLSPISILYI

SEQ ID NO: 2872 - protein, 11 aa, Artificial Sequence
  Non-cyclic GFR-binding peptide
QALSPISILYI

SEQ ID NO: 2873 - protein, 17 aa, Artificial Sequence
  Non-cyclic GFR-binding peptide
  MOD_RES (4)..(4): Xaa is C or S
KPTXAPTKLSPISVLYI

SEQ ID NO: 2874 - protein, 20 aa, Artificial Sequence
  Non-cyclic GFR-binding peptide
  MOD_RES (6)..(7): Xaa is C or S
AVPKAXXAPTKLEPISVLYL

SEQ ID NO: 2875 - protein, 16 aa, Artificial Sequence
  Non-cyclic GFR-binding peptide
  MOD_RES (2)..(3): Xaa is C or S
PXXAPTQLSPISVLYI

SEQ ID NO: 2876 - protein, 15 aa, Artificial Sequence
  Non-cyclic GFR-binding peptide
  MOD_RES (1)..(2): Xaa is C or S
XXVPQALSPISILYI

SEQ ID NO: 2877 - protein, 18 aa, Artificial Sequence
  Non-cyclic GFR-binding peptide
  MOD_RES (4)..(5): Xaa is C or S
AAPXXVPQALEPISILYL

SEQ ID NO: 2878 - protein, 12 aa, Artificial Sequence
  Non-cyclic GFR-binding peptide
PTKLEPISVLYL

SEQ ID NO: 2879 - protein, 15 aa, Artificial Sequence
  Non-cyclic GFR-binding peptide
  MOD_RES (1)..(2): Xaa is C or S
XXVPTKLSPISILYI

SEQ ID NO: 2880 - protein, 15 aa, Artificial Sequence
  Non-cyclic GFR-binding peptide
  MOD_RES (1)..(2): Xaa is C or S
XXVPTKLSPISILYK

SEQ ID NO: 2881 - protein, 17 aa, Artificial Sequence
  Non-cyclic GFR-binding peptide
  MOD_RES (3)..(4): Xaa is C or S
SPXXVPQDLEPISILYL

SEQ ID NO: 2882 - protein, 14 aa, Artificial Sequence
  Non-cyclic GFR-binding peptide
  MOD_RES (1)..(1): Xaa is C or S
XVPARLEPISILYL

SEQ ID NO: 2883 - protein, 18 aa, Artificial Sequence
  Non-cyclic GFR-binding peptide
  MOD_RES (4)..(5): Xaa is C or S
AAPXXVPQALSPISILYI

SEQ ID NO: 2884 - protein, 14 aa, Artificial Sequence
  Non-cyclic GFR-binding peptide
  MOD_RES (1)..(1): Xaa is C or S
XVPTELEPISMLYL

SEQ ID NO: 2885 - protein, 16 aa, Artificial Sequence
  Non-cyclic GFR-binding peptide
  MOD_RES (2)..(3): Xaa is C or S
PXXVSQDLEPISILYL

SEQ ID NO: 2886 - protein, 14 aa, Artificial Sequence
  Non-cyclic GFR-binding peptide
  MOD_RES (1)..(1): Xaa is C or S
XAPTKLSPISVLYI

SEQ ID NO: 2887 - protein, 16 aa, Artificial Sequence
  Non-cyclic GFR-binding peptide
  MOD_RES (2)..(3): Xaa is C or S
PXXVPQALEPISILYL

SEQ ID NO: 2888 - protein, 18 aa, Artificial Sequence
  Non-cyclic GFR-binding peptide
  MOD_RES (4)..(5): Xaa is C or S
PKPXXAPTQLSPISVLYI

SEQ ID NO: 2889 - protein, 20 aa, Artificial Sequence
  Non-cyclic GFR-binding peptide
  MOD_RES (6)..(7): Xaa is C or S
ASASPXXVPQDLEPISILYL

SEQ ID NO: 2890 - protein, 10 aa, Artificial Sequence
  Non-cyclic GFR-binding peptide
KLNAISILYF

SEQ ID NO: 2891 - protein, 13 aa, Artificial Sequence
  Non-cyclic GFR-binding peptide
APTQLSPISVLYI

SEQ ID NO: 2892 - protein, 13 aa, Artificial Sequence
  Non-cyclic GFR-binding peptide
VPTKLSPISILYI

SEQ ID NO: 2893 - protein, 10 aa, Artificial Sequence
  Non-cyclic GFR-binding peptide
ALSPISILYI

SEQ ID NO: 2894 - protein, 14 aa, Artificial Sequence
  Non-cyclic GFR-binding peptide
  MOD_RES (1)..(1): Xaa is C or S
XVPTKLEPISVLYL

SEQ ID NO: 2895 - protein, 13 aa, Artificial Sequence
  Non-cyclic GFR-binding peptide
VPTKLSPISILYK

SEQ ID NO: 2896 - protein, 16 aa, Artificial Sequence
  Non-cyclic GFR-binding peptide
  MOD_RES (2)..(3): Xaa is C or S
AXXAPTKLEPISVLYL

SEQ ID NO: 2897 - protein, 10 aa, Artificial Sequence
  Non-cyclic GFR-binding peptide
RLSPISILYK

SEQ ID NO: 2898 - protein, 17 aa, Artificial Sequence
  Non-cyclic GFR-binding peptide
  MOD_RES (3)..(4): Xaa is C or S
KAXXAPTKLSPISVLYI

SEQ ID NO: 2899 - protein, 13 aa, Artificial Sequence
  Non-cyclic GFR-binding peptide
VPQALSPISILYI

SEQ ID NO: 2900 - protein, 15 aa, Artificial Sequence
  Non-cyclic GFR-binding peptide
  MOD_RES (1)..(2): Xaa is C or S
XXAPTQLSPISVLYI

SEQ ID NO: 2901 - protein, 12 aa, Artificial Sequence
  Non-cyclic GFR-binding peptide
PQDLSPISILYI

SEQ ID NO: 2902 - protein, 15 aa, Artificial Sequence
  Non-cyclic GFR-binding peptide
  MOD_RES (1)..(2): Xaa is C or S
XXVSQDLEPISILYL

SEQ ID NO: 2903 - protein, 14 aa, Artificial Sequence
  Non-cyclic GFR-binding peptide
  MOD_RES (1)..(1): Xaa is C or S
XVPQDLSPISILYI

SEQ ID NO: 2904 - protein, 13 aa, Artificial Sequence
  Non-cyclic GFR-binding peptide
VSQDLEPISILYL

SEQ ID NO: 2905 - protein, 18 aa, Artificial Sequence
  Non-cyclic GFR-binding peptide
  MOD_RES (4)..(5): Xaa is C or S
PASXXVPARLEPISILYL

SEQ ID NO: 2906 - protein, 19 aa, Artificial Sequence
  Non-cyclic GFR-binding peptide
  MOD_RES (6)..(6): Xaa is C or S
VTKPTXAPTKLSPISVLYI

SEQ ID NO: 2907 - protein, 18 aa, Artificial Sequence
  Non-cyclic GFR-binding peptide
  MOD_RES (5)..(5): Xaa is C or S
TKPTXAPTKLSPISVLYI

SEQ ID NO: 2908 - protein, 18 aa, Artificial Sequence
  Non-cyclic GFR-binding peptide
  MOD_RES (4)..(5): Xaa is C or S
PKAXXAPTKLSPISVLYI

SEQ ID NO: 2909 - protein, 10 aa, Artificial Sequence
  Non-cyclic GFR-binding peptide
QLEPISVLYL

SEQ ID NO: 2910 - protein, 15 aa, Artificial Sequence
  Non-cyclic GFR-binding peptide
  MOD_RES (1)..(2): Xaa is C or S
XXVPQDLSPISILYI

SEQ ID NO: 2911 - protein, 20 aa, Artificial Sequence
  Non-cyclic GFR-binding peptide
  MOD_RES (6)..(7): Xaa is C or S
ASAAPXXVPQALSPISILYI

SEQ ID NO: 2912 - protein, 20 aa, Artificial Sequence
  Non-cyclic GFR-binding peptide
  MOD_RES (6)..(7): Xaa is C or S
KIPKAXXVPTELSPISMLYI

SEQ ID NO: 2913 - protein, 16 aa, Artificial Sequence
  Non-cyclic GFR-binding peptide
  MOD_RES (2)..(3): Xaa is C or S
AXXVPTKLSPISVLYI

SEQ ID NO: 2914 - protein, 18 aa, Artificial Sequence
  Non-cyclic GFR-binding peptide
  MOD_RES (4)..(5): Xaa is C or S
SKAXXVPTKLNAISILYF

SEQ ID NO: 2915 - protein, 12 aa, Artificial Sequence
  Non-cyclic GFR-binding peptide
SQDLSPISILYI

SEQ ID NO: 2916 - protein, 19 aa, Artificial Sequence
  Non-cyclic GFR-binding peptide
  MOD_RES (5)..(6): Xaa is C or S
SASPXXVSQDLEPISILYL

SEQ ID NO: 2917 - protein, 17 aa, Artificial Sequence
  Non-cyclic GFR-binding peptide
  MOD_RES (3)..(4): Xaa is C or S
KPXXAPTKLSPISVLYI

SEQ ID NO: 2918 - protein, 12 aa, Artificial Sequence
  Non-cyclic GFR-binding peptide
PTELEPISMLYL

SEQ ID NO: 2919 - protein, 17 aa, Artificial Sequence
  Non-cyclic GFR-binding peptide
  MOD_RES (3)..(4): Xaa is C or S
KPXXAPTQLSPISVLYI

SEQ ID NO: 2920 - protein, 14 aa, Artificial Sequence
  Non-cyclic GFR-binding peptide
  MOD_RES (1)..(1): Xaa is C or S
XVPARLNAISILYF

SEQ ID NO: 2921 - protein, 14 aa, Artificial Sequence
  Non-cyclic GFR-binding peptide
  MOD_RES (1)..(1): Xaa is C or S
XVPQALSPISILYI

SEQ ID NO: 2922 - protein, 19 aa, Artificial Sequence
  Non-cyclic GFR-binding peptide
  MOD_RES (5)..(6): Xaa is C or S
VGKAXXVPTKLSPISVLYI

SEQ ID NO: 2923 - protein, 18 aa, Artificial Sequence
  Non-cyclic GFR-binding peptide
  MOD_RES (4)..(5): Xaa is C or S
PKPXXAPTKLSPISVLYI

SEQ ID NO: 2924 - protein, 19 aa, Artificial Sequence
  Non-cyclic GFR-binding peptide
  MOD_RES (5)..(6): Xaa is C or S
IPKAXXVPTELEPISMLYL

SEQ ID NO: 2925 - protein, 10 aa, Artificial Sequence
  Non-cyclic GFR-binding peptide
DLSPISILYI

SEQ ID NO: 2926 - protein, 20 aa, Artificial Sequence
  Non-cyclic GFR-binding peptide
  MOD_RES (7)..(7): Xaa is C or S
HVTKPTXAPTKLSPISVLYI

SEQ ID NO: 2927 - protein, 13 aa, Artificial Sequence
  Non-cyclic GFR-binding peptide
APTKLSPISVLYI

SEQ ID NO: 2928 - protein, 20 aa, Artificial Sequence
  Non-cyclic GFR-binding peptide
  MOD_RES (6)..(7): Xaa is C or S
YVPKPXXAPTKLEPISVLYL

SEQ ID NO: 2929 - protein, 11 aa, Artificial Sequence
  Non-cyclic GFR-binding peptide
TKLSPISILYK

SEQ ID NO: 2930 - protein, 17 aa, Artificial Sequence
  Non-cyclic GFR-binding peptide
  MOD_RES (3)..(4): Xaa is C or S
KAXXVPTKLSPISILYK

SEQ ID NO: 2931 - protein, 17 aa, Artificial Sequence
  Non-cyclic GFR-binding peptide
  MOD_RES (3)..(4): Xaa is C or S
KAXXVPTKLSPISILYI

SEQ ID NO: 2932 - protein, 12 aa, Artificial Sequence
  Non-cyclic GFR-binding peptide
PTQLEPISVLYL

SEQ ID NO: 2933 - protein, 11 aa, Artificial Sequence
  Non-cyclic GFR-binding peptide
TKLSPISILYI

SEQ ID NO: 2934 - protein, 10 aa, Artificial Sequence
  Non-cyclic GFR-binding peptide
KLEPISVLYL

SEQ ID NO: 2935 - protein, 16 aa, Artificial Sequence
  Non-cyclic GFR-binding peptide
  MOD_RES (14)..(15): Xaa is C or S
FYLMNIPSLETPVXXA

SEQ ID NO: 2936 - protein, 13 aa, Artificial Sequence
  Non-cyclic GFR-binding peptide
FYLVNIPSLKTPA

SEQ ID NO: 2937 - protein, 14 aa, Artificial Sequence
  Non-cyclic GFR-binding peptide
  MOD_RES (14)..(14): Xaa is C or S
FYLINIPSLKTPVX

SEQ ID NO: 2938 - protein, 16 aa, Artificial Sequence
  Non-cyclic GFR-binding peptide
  MOD_RES (14)..(15): Xaa is C or S
FYLINIPSLRAPVXXS

SEQ ID NO: 2939 - protein, 15 aa, Artificial Sequence
  Non-cyclic GFR-binding peptide
  MOD_RES (14)..(15): Xaa is C or S
FYLMNIPSTKVPAXX

SEQ ID NO: 2940 - protein, 14 aa, Artificial Sequence
  Non-cyclic GFR-binding peptide
  MOD_RES (14)..(14): Xaa is C or S
FYLVNIPSLQTPAX

SEQ ID NO: 2941 - protein, 19 aa, Artificial Sequence
  Non-cyclic GFR-binding peptide
  MOD_RES (14)..(15): Xaa is C or S
FYLMNIPSLETPVXXAKPI

SEQ ID NO: 2942 - protein, 13 aa, Artificial Sequence
  Non-cyclic GFR-binding peptide
FYLINIPSLRTPV

SEQ ID NO: 2943 - protein, 20 aa, Artificial Sequence
  Non-cyclic GFR-binding peptide
  MOD_RES (14)..(15): Xaa is C or S
FYLINIPSLRAPVXXSAPAA

SEQ ID NO: 2944 - protein, 13 aa, Artificial Sequence
  Non-cyclic GFR-binding peptide
FYLVNIPSLKTPV

SEQ ID NO: 2945 - protein, 17 aa, Artificial Sequence
  Non-cyclic GFR-binding peptide
  MOD_RES (14)..(15): Xaa is C or S
FYLVNIPSLKTPAXXAK

SEQ ID NO: 2946 - protein, 10 aa, Artificial Sequence
  Non-cyclic GFR-binding peptide
FYLVNIPSLQ

SEQ ID NO: 2947 - protein, 10 aa, Artificial Sequence
  Non-cyclic GFR-binding peptide
FYLINIPSLR

SEQ ID NO: 2948 - protein, 10 aa, Artificial Sequence
  Non-cyclic GFR-binding peptide
FYLVNIPSLK

SEQ ID NO: 2949 - protein, 15 aa, Artificial Sequence
  Non-cyclic GFR-binding peptide
  MOD_RES (14)..(15): Xaa is C or S
FYLMNIPSLETPVXX

SEQ ID NO: 2950 - protein, 16 aa, Artificial Sequence
  Non-cyclic GFR-binding peptide
  MOD_RES (14)..(15): Xaa is C or S
FYLINIPSLRTPVXXT

SEQ ID NO: 2951 - protein, 14 aa, Artificial Sequence
  Non-cyclic GFR-binding peptide
  MOD_RES (14)..(14): Xaa is C or S
FYLINIPSLRTPVX

SEQ ID NO: 2952 - protein, 17 aa, Artificial Sequence
  Non-cyclic GFR-binding peptide
  MOD_RES (14)..(14): Xaa is C or S
FYLVNIPSLKTPAXTPK

SEQ ID NO: 2953 - protein, 20 aa, Artificial Sequence
  Non-cyclic GFR-binding peptide
  MOD_RES (14)..(15): Xaa is C or S
FYLINIPSLKTPVXXAKSAK

SEQ ID NO: 2954 - protein, 11 aa, Artificial Sequence
  Non-cyclic GFR-binding peptide
FYLMNIPSLET

SEQ ID NO: 2955 - protein, 11 aa, Artificial Sequence
  Non-cyclic GFR-binding peptide
FYLINIPSLRA

SEQ ID NO: 2956 - protein, 19 aa, Artificial Sequence
  Non-cyclic GFR-binding peptide
  MOD_RES (14)..(14): Xaa is C or S
FYLVNIPSLKTPAXTPKTV

SEQ ID NO: 2957 - protein, 13 aa, Artificial Sequence
  Non-cyclic GFR-binding peptide
FYLINIPSLKTPV

SEQ ID NO: 2958 - protein, 20 aa, Artificial Sequence
  Non-cyclic GFR-binding peptide
  MOD_RES (14)..(15): Xaa is C or S
FYLMNIPSLETPVXXAKPIS

SEQ ID NO: 2959 - protein, 17 aa, Artificial Sequence
  Non-cyclic GFR-binding peptide
  MOD_RES (14)..(15): Xaa is C or S
FYLINIPSLRTPVXXTP

SEQ ID NO: 2960 - protein, 13 aa, Artificial Sequence
  Non-cyclic GFR-binding peptide
FYLVNIPSLQTPA

SEQ ID NO: 2961 - protein, 9 aa, Artificial Sequence
  Non-cyclic GFR-binding peptide
FYLMNIPSL

SEQ ID NO: 2962 - protein, 16 aa, Artificial Sequence
  Non-cyclic GFR-binding peptide
  MOD_RES (14)..(15): Xaa is C or S
FYLMNIPSTKVPAXXT

SEQ ID NO: 2963 - protein, 12 aa, Artificial Sequence
  Non-cyclic GFR-binding peptide
FYLINIPSLKTP

SEQ ID NO: 2964 - protein, 20 aa, Artificial Sequence
  Non-cyclic GFR-binding peptide
  MOD_RES (14)..(15): Xaa is C or S
FYLVNIPSLQTPAXXPKPVT

SEQ ID NO: 2965 - protein, 20 aa, Artificial Sequence
  Non-cyclic GFR-binding peptide
  MOD_RES (14)..(15): Xaa is C or S
FYLVNIPSLKTPVXXAKGVK

SEQ ID NO: 2966 - protein, 12 aa, Artificial Sequence
  Non-cyclic GFR-binding peptide
FYLMNIPSLETP

SEQ ID NO: 2967 - protein, 14 aa, Artificial Sequence
  Non-cyclic GFR-binding peptide
  MOD_RES (14)..(14): Xaa is C or S
FYLVNIPSLKTPVX

SEQ ID NO: 2968 - protein, 18 aa, Artificial Sequence
  Non-cyclic GFR-binding peptide
  MOD_RES (14)..(15): Xaa is C or S
FYLMNIPSLETPVXXAKP

SEQ ID NO: 2969 - protein, 16 aa, Artificial Sequence
  Non-cyclic GFR-binding peptide
  MOD_RES (14)..(15): Xaa is C or S
FYLVNIPSLKTPAXXP

SEQ ID NO: 2970 - protein, 18 aa, Artificial Sequence
  Non-cyclic GFR-binding peptide
  MOD_RES (14)..(14): Xaa is C or S
FYLVNIPSLKTPAXTPKT

SEQ ID NO: 2971 - protein, 15 aa, Artificial Sequence
  Non-cyclic GFR-binding peptide
  MOD_RES (14)..(15): Xaa is C or S
FYLINIPSLRAPVXX

SEQ ID NO: 2972 - protein, 19 aa, Artificial Sequence
  Non-cyclic GFR-binding peptide
  MOD_RES (14)..(15): Xaa is C or S
FYLVNIPSLKTPAXXAKPV

SEQ ID NO: 2973 - protein, 20 aa, Artificial Sequence
  Non-cyclic GFR-binding peptide
  MOD_RES (14)..(15): Xaa is C or S
FYLMNIPSLETPVXXAKPIK

SEQ ID NO: 2974 - protein, 13 aa, Artificial Sequence
  Non-cyclic GFR-binding peptide
FYLMNIPSTKVPA

SEQ ID NO: 2975 - protein, 12 aa, Artificial Sequence
  Non-cyclic GFR-binding peptide
FYLMNIPSTKVP

SEQ ID NO: 2976 - protein, 17 aa, Artificial Sequence
  Non-cyclic GFR-binding peptide
  MOD_RES (14)..(15): Xaa is C or S
FYLVNIPSLQTPAXXPK

SEQ ID NO: 2977 - protein, 11 aa, Artificial Sequence
  Non-cyclic GFR-binding peptide
FYLVNIPSLQT

SEQ ID NO: 2978 - protein, 14 aa, Artificial Sequence
  Non-cyclic GFR-binding peptide
  MOD_RES (14)..(14): Xaa is C or S
FYLMNIPSLETPVX

SEQ ID NO: 2979 - protein, 18 aa, Artificial Sequence
  Non-cyclic GFR-binding peptide
  MOD_RES (14)..(15): Xaa is C or S
FYLMNIPSTKVPAXXTSP

SEQ ID NO: 2980 - protein, 19 aa, Artificial Sequence
  Non-cyclic GFR-binding peptide
  MOD_RES (14)..(15): Xaa is C or S
FYLVNIPSLQTPAXXPKPV

SEQ ID NO: 2981 - protein, 16 aa, Artificial Sequence
  Non-cyclic GFR-binding peptide
  MOD_RES (14)..(15): Xaa is C or S
FYLVNIPSLKTPVXXA

SEQ ID NO: 2982 - protein, 10 aa, Artificial Sequence
  Non-cyclic GFR-binding peptide
FYLMNIPSTK

SEQ ID NO: 2983 - protein, 18 aa, Artificial Sequence
  Non-cyclic GFR-binding peptide
  MOD_RES (14)..(15): Xaa is C or S
FYLINIPSLRTPVXXTPP

SEQ ID NO: 2984 - protein, 18 aa, Artificial Sequence
  Non-cyclic GFR-binding peptide
  MOD_RES (14)..(15): Xaa is C or S
FYLVNIPSLQTPAXXPKP

SEQ ID NO: 2985 - protein, 18 aa, Artificial Sequence
  Non-cyclic GFR-binding peptide
  MOD_RES (14)..(15): Xaa is C or S
FYLVNIPSLKTPAXXPKP

SEQ ID NO: 2986 - protein, 16 aa, Artificial Sequence
  Non-cyclic GFR-binding peptide
  MOD_RES (14)..(15): Xaa is C or S
FYLVNIPSLKTPAXXA

SEQ ID NO: 2987 - protein, 18 aa, Artificial Sequence
  Non-cyclic GFR-binding peptide
  MOD_RES (14)..(15): Xaa is C or S
FYLINIPSLKTPVXXAKS

SEQ ID NO: 2988 - protein, 13 aa, Artificial Sequence
  Non-cyclic GFR-binding peptide
FYLMNIPSLETPV

SEQ ID NO: 2989 - protein, 16 aa, Artificial Sequence
  Non-cyclic GFR-binding peptide
  MOD_RES (14)..(15): Xaa is C or S
FYLINIPSLKTPVXXA

SEQ ID NO: 2990 - protein, 13 aa, Artificial Sequence
  Non-cyclic GFR-binding peptide
FYLINIPSLRAPV

SEQ ID NO: 2991 - protein, 11 aa, Artificial Sequence
  Non-cyclic GFR-binding peptide
FYLINIPSLRT

SEQ ID NO: 2992 - protein, 20 aa, Artificial Sequence
  Non-cyclic GFR-binding peptide
  MOD_RES (14)..(15): Xaa is C or S
FYLVNIPSLKTPAXXPKPVH

SEQ ID NO: 2993 - protein, 15 aa, Artificial Sequence
  Non-cyclic GFR-binding peptide
  MOD_RES (14)..(15): Xaa is C or S
FYLINIPSLRTPVXX

SEQ ID NO: 2994 - protein, 9 aa, Artificial Sequence
  Non-cyclic GFR-binding peptide
FYLVNIPSL

SEQ ID NO: 2995 - protein, 16 aa, Artificial Sequence
  Non-cyclic GFR-binding peptide
  MOD_RES (14)..(14): Xaa is C or S
FYLVNIPSLKTPAXTP

SEQ ID NO: 2996 - protein, 15 aa, Artificial Sequence
  Non-cyclic GFR-binding peptide
  MOD_RES (14)..(15): Xaa is C or S
FYLVNIPSLKTPVXX

SEQ ID NO: 2997 - protein, 12 aa, Artificial Sequence
  Non-cyclic GFR-binding peptide
FYLINIPSLRTP

SEQ ID NO: 2998 - protein, 15 aa, Artificial Sequence
  Non-cyclic GFR-binding peptide
  MOD_RES (14)..(15): Xaa is C or S
FYLVNIPSLKTPAXX

SEQ ID NO: 2999 - protein, 11 aa, Artificial Sequence
  Non-cyclic GFR-binding peptide
FYLMNIPSTKV

SEQ ID NO: 3000 - protein, 17 aa, Artificial Sequence
  Non-cyclic GFR-binding peptide
  MOD_RES (14)..(15): Xaa is C or S
FYLMNIPSLETPVXXAK

SEQ ID NO: 3001 - protein, 12 aa, Artificial Sequence
  Non-cyclic GFR-binding peptide
FYLVNIPSLQTP

SEQ ID NO: 3002 - protein, 15 aa, Artificial Sequence
  Non-cyclic GFR-binding peptide
  MOD_RES (14)..(15): Xaa is C or S
FYLINIPSLKTPVXX

SEQ ID NO: 3003 - skipped

SEQ ID NO: 3004 - protein, 11 aa, Artificial Sequence
  Non-cyclic GFR-binding peptide
FYLINIPSLKT

SEQ ID NO: 3005 - protein, 12 aa, Artificial Sequence
  Non-cyclic GFR-binding peptide
FYLVNIPSLKTP

SEQ ID NO: 3006 - protein, 18 aa, Artificial Sequence
  Non-cyclic GFR-binding peptide
  MOD_RES (14)..(15): Xaa is C or S
FYLVNIPSLKTPVXXAKG

SEQ ID NO: 3007 - protein, 15 aa, Artificial Sequence
  Non-cyclic GFR-binding peptide
  MOD_RES (14)..(15): Xaa is C or S
FYLVNIPSLQTPAXX

SEQ ID NO: 3008 - protein, 19 aa, Artificial Sequence
  Non-cyclic GFR-binding peptide
  MOD_RES (14)..(15): Xaa is C or S
FYLMNIPSTKVPAXXTSPV

SEQ ID NO: 3009 - protein, 9 aa, Artificial Sequence
  Non-cyclic GFR-binding peptide
FYLINIPSL

SEQ ID NO: 3010 - protein, 17 aa, Artificial Sequence
  Non-cyclic GFR-binding peptide
  MOD_RES (14)..(15): Xaa is C or S
FYLMNIPSTKVPAXXTS

SEQ ID NO: 3011 - protein, 15 aa, Artificial Sequence
  Non-cyclic GFR-binding peptide
  MOD_RES (14)..(14): Xaa is C or S
FYLVNIPSLKTPAXT

SEQ ID NO: 3012 - protein, 12 aa, Artificial Sequence
  Non-cyclic GFR-binding peptide
FYLINIPSLRAP

SEQ ID NO: 3013 - protein, 16 aa, Artificial Sequence
  Non-cyclic GFR-binding peptide
  MOD_RES (14)..(15): Xaa is C or S
FYLVNIPSLQTPAXXP

SEQ ID NO: 3014 - protein, 20 aa, Artificial Sequence
  Non-cyclic GFR-binding peptide
  MOD_RES (14)..(15): Xaa is C or S
FYLVNIPSLKTPAXXPKPVY

SEQ ID NO: 3015 - protein, 10 aa, Artificial Sequence
  Non-cyclic GFR-binding peptide
FYLMNIPSLE

SEQ ID NO: 3016 - protein, 18 aa, Artificial Sequence
  Non-cyclic GFR-binding peptide
  MOD_RES (14)..(15): Xaa is C or S
FYLVNIPSLKTPAXXAKP

SEQ ID NO: 3017 - protein, 18 aa, Artificial Sequence
  Non-cyclic GFR-binding peptide
  MOD_RES (14)..(15): Xaa is C or S
FYLINIPSLRAPVXXSAP

SEQ ID NO: 3018 - protein, 19 aa, Artificial Sequence
  Non-cyclic GFR-binding peptide
  MOD_RES (14)..(15): Xaa is C or S
FYLINIPSLRAPVXXSAPA

SEQ ID NO: 3019 - protein, 14 aa, Artificial Sequence
  Non-cyclic GFR-binding peptide
  MOD_RES (14)..(14): Xaa is C or S
FYLMNIPSTKVPAX

SEQ ID NO: 3020 - protein, 17 aa, Artificial Sequence
  Non-cyclic GFR-binding peptide
  MOD_RES (14)..(15): Xaa is C or S
FYLINIPSLKTPVXXAK

SEQ ID NO: 3021 - protein, 10 aa, Artificial Sequence
  Non-cyclic GFR-binding peptide
FYLINIPSLK

SEQ ID NO: 3022 - protein, 11 aa, Artificial Sequence
  Non-cyclic GFR-binding peptide
FYLVNIPSLKT

SEQ ID NO: 3023 - protein, 17 aa, Artificial Sequence
  Non-cyclic GFR-binding peptide
  MOD_RES (14)..(15): Xaa is C or S
FYLVNIPSLKTPAXXPK

SEQ ID NO: 3024 - protein, 20 aa, Artificial Sequence
  Non-cyclic GFR-binding peptide
  MOD_RES (14)..(15): Xaa is C or S
FYLINIPSLRTPVXXTPPTS

SEQ ID NO: 3025 - protein, 9 aa, Artificial Sequence
  Non-cyclic GFR-binding peptide
FYLMNIPST

SEQ ID NO: 3026 - protein, 17 aa, Artificial Sequence
  Non-cyclic GFR-binding peptide
  MOD_RES (14)..(15): Xaa is C or S
FYLINIPSLRAPVXXSA

SEQ ID NO: 3027 - protein, 19 aa, Artificial Sequence
  Non-cyclic GFR-binding peptide
  MOD_RES (14)..(15): Xaa is C or S
FYLVNIPSLKTPVXXAKGV

SEQ ID NO: 3028 - protein, 14 aa, Artificial Sequence
  Non-cyclic GFR-binding peptide
  MOD_RES (14)..(14): Xaa is C or S
FYLVNIPSLKTPAX

SEQ ID NO: 3029 - protein, 20 aa, Artificial Sequence
  Non-cyclic GFR-binding peptide
  MOD_RES (14)..(14): Xaa is C or S
FYLVNIPSLKTPAXTPKTVH

SEQ ID NO: 3030 - protein, 20 aa, Artificial Sequence
  Non-cyclic GFR-binding peptide
  MOD_RES (14)..(15): Xaa is C or S
FYLVNIPSLKTPAXXAKPVA

SEQ ID NO: 3031 - protein, 19 aa, Artificial Sequence
  Non-cyclic GFR-binding peptide
  MOD_RES (14)..(15): Xaa is C or S
FYLINIPSLRTPVXXTPPT

SEQ ID NO: 3032 - protein, 14 aa, Artificial Sequence
  Non-cyclic GFR-binding peptide
  MOD_RES (14)..(14): Xaa is C or S
FYLINIPSLRAPVX

SEQ ID NO: 3033 - protein, 17 aa, Artificial Sequence
  Non-cyclic GFR-binding peptide
  MOD_RES (14)..(15): Xaa is C or S
FYLVNIPSLKTPVXXAK

SEQ ID NO: 3034 - protein, 19 aa, Artificial Sequence
  Non-cyclic GFR-binding peptide
  MOD_RES (14)..(15): Xaa is C or S
FYLVNIPSLKTPAXXPKPV

SEQ ID NO: 3035 - protein, 19 aa, Artificial Sequence
  Non-cyclic GFR-binding peptide
  MOD_RES (14)..(15): Xaa is C or S
FYLINIPSLKTPVXXAKSA

SEQ ID NO: 3036 - protein, 20 aa, Artificial Sequence
  Non-cyclic GFR-binding peptide
  MOD_RES (14)..(15): Xaa is C or S
FYLMNIPSTKVPAXXTSPVR

SEQ ID NO: 3037 - protein, 16 aa, Artificial Sequence
  Non-cyclic GFR-binding peptide
  MOD_RES (2)..(3): Xaa is C or S
AXXVPTELSPINMLYF

SEQ ID NO: 3038 - protein, 13 aa, Artificial Sequence
  Non-cyclic GFR-binding peptide
APTKLSPINVLYF

SEQ ID NO: 3039 - protein, 14 aa, Artificial Sequence
  Non-cyclic GFR-binding peptide
  MOD_RES (1)..(1): Xaa is C or S
XVPTKLSPINILYF

SEQ ID NO: 3040 - protein, 16 aa, Artificial Sequence
  Non-cyclic GFR-binding peptide
  MOD_RES (2)..(3): Xaa is C or S
SXXVPARLSPINILYF

SEQ ID NO: 3041 - protein, 15 aa, Artificial Sequence
  Non-cyclic GFR-binding peptide
  MOD_RES (1)..(2): Xaa is C or S
XXAPVKTSPINMLYF

SEQ ID NO: 3042 - protein, 14 aa, Artificial Sequence
  Non-cyclic GFR-binding peptide
  MOD_RES (1)..(1): Xaa is C or S
XAPTQLSPINVLYF

SEQ ID NO: 3043 - protein, 19 aa, Artificial Sequence
  Non-cyclic GFR-binding peptide
  MOD_RES (5)..(6): Xaa is C or S
IPKAXXVPTELSPINMLYF

SEQ ID NO: 3044 - protein, 13 aa, Artificial Sequence
  Non-cyclic GFR-binding peptide
VPTRLSPINILYF

SEQ ID NO: 3045 - protein, 20 aa, Artificial Sequence
  Non-cyclic GFR-binding peptide
  MOD_RES (6)..(7): Xaa is C or S
AAPASXXVPARLSPINILYF

SEQ ID NO: 3046 - protein, 13 aa, Artificial Sequence
  Non-cyclic GFR-binding peptide
VPTKLSPINVLYF

SEQ ID NO: 3047 - protein, 17 aa, Artificial Sequence
  Non-cyclic GFR-binding peptide
  MOD_RES (3)..(4): Xaa is C or S
KAXXAPTKLSPINVLYF

SEQ ID NO: 3048 - protein, 10 aa, Artificial Sequence
  Non-cyclic GFR-binding peptide
QLSPINVLYF

SEQ ID NO: 3049 - protein, 10 aa, Artificial Sequence
  Non-cyclic GFR-binding peptide
RLSPINILYF

SEQ ID NO: 3050 - protein, 10 aa, Artificial Sequence
  Non-cyclic GFR-binding peptide
KLSPINVLYF

SEQ ID NO: 3051 - protein, 15 aa, Artificial Sequence
  Non-cyclic GFR-binding peptide
  MOD_RES (1)..(2): Xaa is C or S
XXVPTELSPINMLYF

SEQ ID NO: 3052 - protein, 16 aa, Artificial Sequence
  Non-cyclic GFR-binding peptide
  MOD_RES (2)..(3): Xaa is C or S
TXXVPTRLSPINILYF

SEQ ID NO: 3053 - protein, 14 aa, Artificial Sequence
  Non-cyclic GFR-binding peptide
  MOD_RES (1)..(1): Xaa is C or S
XVPTRLSPINILYF

SEQ ID NO: 3054 - protein, 17 aa, Artificial Sequence
  Non-cyclic GFR-binding peptide
  MOD_RES (4)..(4): Xaa is C or S
KPTXAPTKLSPINVLYF

SEQ ID NO: 3055 - protein, 20 aa, Artificial Sequence
  Non-cyclic GFR-binding peptide
  MOD_RES (6)..(7): Xaa is C or S
KASKAXXVPTKLSPINILYF

SEQ ID NO: 3056 - protein, 11 aa, Artificial Sequence
  Non-cyclic GFR-binding peptide
TELSPINMLYF

SEQ ID NO: 3057 - protein, 11 aa, Artificial Sequence
  Non-cyclic GFR-binding peptide
ARLSPINILYF

SEQ ID NO: 3058 - protein, 19 aa, Artificial Sequence
  Non-cyclic GFR-binding peptide
  MOD_RES (6)..(6): Xaa is C or S
VTKPTXAPTKLSPINVLYF

SEQ ID NO: 3059 - protein, 13 aa, Artificial Sequence
  Non-cyclic GFR-binding peptide
VPTKLSPINILYF

SEQ ID NO: 3060 - protein, 20 aa, Artificial Sequence
  Non-cyclic GFR-binding peptide
  MOD_RES (6)..(7): Xaa is C or S
SIPKAXXVPTELSPINMLYF

SEQ ID NO: 3061 - protein, 17 aa, Artificial Sequence
  Non-cyclic GFR-binding peptide
  MOD_RES (3)..(4): Xaa is C or S
PTXXVPTRLSPINILYF

SEQ ID NO: 3062 - protein, 13 aa, Artificial Sequence
  Non-cyclic GFR-binding peptide
APTQLSPINVLYF

SEQ ID NO: 3063 - protein, 9 aa, Artificial Sequence
  Non-cyclic GFR-binding peptide
LSPINMLYF

SEQ ID NO: 3064 - protein, 16 aa, Artificial Sequence
  Non-cyclic GFR-binding peptide
  MOD_RES (2)..(3): Xaa is C or S
TXXAPVKTSPINMLYF

SEQ ID NO: 3065 - protein, 12 aa, Artificial Sequence
  Non-cyclic GFR-binding peptide
PTKLSPINILYF

SEQ ID NO: 3066 - protein, 20 aa, Artificial Sequence
  Non-cyclic GFR-binding peptide
  MOD_RES (6)..(7): Xaa is C or S
TVPKPXXAPTQLSPINVLYF

SEQ ID NO: 3067 - protein, 20 aa, Artificial Sequence
  Non-cyclic GFR-binding peptide
  MOD_RES (6)..(7): Xaa is C or S
KVGKAXXVPTKLSPINVLYF

SEQ ID NO: 3068 - protein, 12 aa, Artificial Sequence
  Non-cyclic GFR-binding peptide
PTELSPINMLYF

SEQ ID NO: 3069 - protein, 14 aa, Artificial Sequence
  Non-cyclic GFR-binding peptide
  MOD_RES (1)..(1): Xaa is C or S
XVPTKLSPINVLYF

SEQ ID NO: 3070 - protein, 18 aa, Artificial Sequence
  Non-cyclic GFR-binding peptide
  MOD_RES (4)..(5): Xaa is C or S
PKAXXVPTELSPINMLYF

SEQ ID NO: 3071 - protein, 16 aa, Artificial Sequence
  Non-cyclic GFR-binding peptide
  MOD_RES (2)..(3): Xaa is C or S
PXXAPTKLSPINVLYF

SEQ ID NO: 3072 - protein, 18 aa, Artificial Sequence
  Non-cyclic GFR-binding peptide
  MOD_RES (5)..(5): Xaa is C or S
TKPTXAPTKLSPINVLYF

SEQ ID NO: 3073 - protein, 15 aa, Artificial Sequence
  Non-cyclic GFR-binding peptide
  MOD_RES (1)..(2): Xaa is C or S
XXVPARLSPINILYF

SEQ ID NO: 3074 - protein, 19 aa, Artificial Sequence
  Non-cyclic GFR-binding peptide
  MOD_RES (5)..(6): Xaa is C or S
VPKAXXAPTKLSPINVLYF

SEQ ID NO: 3075 - protein, 20 aa, Artificial Sequence
  Non-cyclic GFR-binding peptide
  MOD_RES (6)..(7): Xaa is C or S
KIPKAXXVPTELSPINMLYF

SEQ ID NO: 3076 - protein, 13 aa, Artificial Sequence
  Non-cyclic GFR-binding peptide
APVKTSPINMLYF

SEQ ID NO: 3077 - protein, 12 aa, Artificial Sequence
  Non-cyclic GFR-binding peptide
PVKTSPINMLYF

SEQ ID NO: 3078 - protein, 17 aa, Artificial Sequence
  Non-cyclic GFR-binding peptide
  MOD_RES (3)..(4): Xaa is C or S
KPXXAPTQLSPINVLYF

SEQ ID NO: 3079 - protein, 11 aa, Artificial Sequence
  Non-cyclic GFR-binding peptide
TQLSPINVLYF

SEQ ID NO: 3080 - protein, 14 aa, Artificial Sequence
  Non-cyclic GFR-binding peptide
  MOD_RES (1)..(1): Xaa is C or S
XVPTELSPINMLYF

SEQ ID NO: 3081 - protein, 18 aa, Artificial Sequence
  Non-cyclic GFR-binding peptide
  MOD_RES (4)..(5): Xaa is C or S
PSTXXAPVKTSPINMLYF

SEQ ID NO: 3082 - protein, 19 aa, Artificial Sequence
  Non-cyclic GFR-binding peptide
  MOD_RES (5)..(6): Xaa is C or S
VPKPXXAPTQLSPINVLYF

SEQ ID NO: 3083 - protein, 16 aa, Artificial Sequence
  Non-cyclic GFR-binding peptide
  MOD_RES (2)..(3): Xaa is C or S
AXXVPTKLSPINVLYF

SEQ ID NO: 3084 - protein, 10 aa, Artificial Sequence
  Non-cyclic GFR-binding peptide
KTSPINMLYF

SEQ ID NO: 3085 - protein, 18 aa, Artificial Sequence
  Non-cyclic GFR-binding peptide
  MOD_RES (4)..(5): Xaa is C or S
PPTXXVPTRLSPINILYF

SEQ ID NO: 3086 - protein, 18 aa, Artificial Sequence
  Non-cyclic GFR-binding peptide
  MOD_RES (4)..(5): Xaa is C or S
PKPXXAPTQLSPINVLYF

SEQ ID NO: 3087 - protein, 18 aa, Artificial Sequence
  Non-cyclic GFR-binding peptide
  MOD_RES (4)..(5): Xaa is C or S
PKPXXAPTKLSPINVLYF

SEQ ID NO: 3088 - protein, 16 aa, Artificial Sequence
  Non-cyclic GFR-binding peptide
  MOD_RES (2)..(3): Xaa is C or S
AXXAPTKLSPINVLYF

SEQ ID NO: 3089 - protein, 18 aa, Artificial Sequence
  Non-cyclic GFR-binding peptide
  MOD_RES (4)..(5): Xaa is C or S
SKAXXVPTKLSPINILYF

SEQ ID NO: 3090 - protein, 13 aa, Artificial Sequence
  Non-cyclic GFR-binding peptide
VPTELSPINMLYF

SEQ ID NO: 3091 - protein, 16 aa, Artificial Sequence
  Non-cyclic GFR-binding peptide
  MOD_RES (2)..(3): Xaa is C or S
AXXVPTKLSPINILYF

SEQ ID NO: 3092 - protein, 13 aa, Artificial Sequence
  Non-cyclic GFR-binding peptide
VPARLSPINILYF

SEQ ID NO: 3093 - protein, 11 aa, Artificial Sequence
  Non-cyclic GFR-binding peptide
TRLSPINILYF

SEQ ID NO: 3094 - protein, 20 aa, Artificial Sequence
  Non-cyclic GFR-binding peptide
  MOD_RES (6)..(7): Xaa is C or S
HVPKPXXAPTKLSPINVLYF

SEQ ID NO: 3095 - protein, 15 aa, Artificial Sequence
  Non-cyclic GFR-binding peptide
  MOD_RES (1)..(2): Xaa is C or S
XXVPTRLSPINILYF

SEQ ID NO: 3096 - protein, 9 aa, Artificial Sequence
  Non-cyclic GFR-binding peptide
LSPINVLYF

SEQ ID NO: 3097 - protein, 16 aa, Artificial Sequence
  Non-cyclic GFR-binding peptide
  MOD_RES (3)..(3): Xaa is C or S
PTXAPTKLSPINVLYF

SEQ ID NO: 3098 - protein, 15 aa, Artificial Sequence
  Non-cyclic GFR-binding peptide
  MOD_RES (1)..(2): Xaa is C or S
XXVPTKLSPINVLYF

SEQ ID NO: 3099 - protein, 12 aa, Artificial Sequence
  Non-cyclic GFR-binding peptide
PTRLSPINILYF

SEQ ID NO: 3100 - protein, 15 aa, Artificial Sequence
  Non-cyclic GFR-binding peptide
  MOD_RES (1)..(2): Xaa is C or S
XXAPTKLSPINVLYF

SEQ ID NO: 3101 - protein, 11 aa, Artificial Sequence
  Non-cyclic GFR-binding peptide
VKTSPINMLYF

SEQ ID NO: 3102 - protein, 17 aa, Artificial Sequence
  Non-cyclic GFR-binding peptide
  MOD_RES (3)..(4): Xaa is C or S
KAXXVPTELSPINMLYF

SEQ ID NO: 3103 - protein, 12 aa, Artificial Sequence
  Non-cyclic GFR-binding peptide
PTQLSPINVLYF

SEQ ID NO: 3104 - protein, 15 aa, Artificial Sequence
  Non-cyclic GFR-binding peptide
  MOD_RES (1)..(2): Xaa is C or S
XXVPTKLSPINILYF

SEQ ID NO: 3105 - skipped

SEQ ID NO: 3106 - protein, 11 aa, Artificial Sequence
  Non-cyclic GFR-binding peptide
TKLSPINILYF

SEQ ID NO: 3107 - protein, 12 aa, Artificial Sequence
  Non-cyclic GFR-binding peptide
PTKLSPINVLYF

SEQ ID NO: 3108 - protein, 18 aa, Artificial Sequence
  Non-cyclic GFR-binding peptide
  MOD_RES (4)..(5): Xaa is C or S
GKAXXVPTKLSPINVLYF

SEQ ID NO: 3109 - protein, 15 aa, Artificial Sequence
  Non-cyclic GFR-binding peptide
  MOD_RES (1)..(2): Xaa is C or S
XXAPTQLSPINVLYF

SEQ ID NO: 3110 - protein, 19 aa, Artificial Sequence
  Non-cyclic GFR-binding peptide
  MOD_RES (5)..(6): Xaa is C or S
VPSTXXAPVKTSPINMLYF

SEQ ID NO: 3111 - protein, 9 aa, Artificial Sequence
  Non-cyclic GFR-binding peptide
LSPINILYF

SEQ ID NO: 3112 - protein, 17 aa, Artificial Sequence
  Non-cyclic GFR-binding peptide
  MOD_RES (3)..(4): Xaa is C or S
STXXAPVKTSPINMLYF

SEQ ID NO: 3113 - protein, 15 aa, Artificial Sequence
  Non-cyclic GFR-binding peptide
  MOD_RES (2)..(2): Xaa is C or S
TXAPTKLSPINVLYF

SEQ ID NO: 3114 - protein, 12 aa, Artificial Sequence
  Non-cyclic GFR-binding peptide
PARLSPINILYF

SEQ ID NO: 3115 - protein, 16 aa, Artificial Sequence
  Non-cyclic GFR-binding peptide
  MOD_RES (2)..(3): Xaa is C or S
PXXAPTQLSPINVLYF

SEQ ID NO: 3116 - protein, 20 aa, Artificial Sequence
  Non-cyclic GFR-binding peptide
  MOD_RES (6)..(7): Xaa is C or S
YVPKPXXAPTKLSPINVLYF

SEQ ID NO: 3117 - protein, 10 aa, Artificial Sequence
  Non-cyclic GFR-binding peptide
ELSPINMLYF

SEQ ID NO: 3118 - protein, 18 aa, Artificial Sequence
  Non-cyclic GFR-binding peptide
  MOD_RES (4)..(5): Xaa is C or S
PKAXXAPTKLSPINVLYF

SEQ ID NO: 3119 - protein, 18 aa, Artificial Sequence
  Non-cyclic GFR-binding peptide
  MOD_RES (4)..(5): Xaa is C or S
PASXXVPARLSPINILYF

SEQ ID NO: 3120 - protein, 19 aa, Artificial Sequence
  Non-cyclic GFR-binding peptide
  MOD_RES (5)..(6): Xaa is C or S
APASXXVPARLSPINILYF

SEQ ID NO: 3121 - protein, 14 aa, Artificial Sequence
  Non-cyclic GFR-binding peptide
  MOD_RES (1)..(1): Xaa is C or S
XAPVKTSPINMLYF

SEQ ID NO: 3122 - protein, 17 aa, Artificial Sequence
  Non-cyclic GFR-binding peptide
  MOD_RES (3)..(4): Xaa is C or S
KAXXVPTKLSPINILYF

SEQ ID NO: 3123 - protein, 10 aa, Artificial Sequence
  Non-cyclic GFR-binding peptide
KLSPINILYF

SEQ ID NO: 3124 - protein, 11 aa, Artificial Sequence
  Non-cyclic GFR-binding peptide
TKLSPINVLYF

SEQ ID NO: 3125 - protein, 17 aa, Artificial Sequence
  Non-cyclic GFR-binding peptide
  MOD_RES (3)..(4): Xaa is C or S
KPXXAPTKLSPINVLYF

SEQ ID NO: 3126 - protein, 20 aa, Artificial Sequence
  Non-cyclic GFR-binding peptide
  MOD_RES (6)..(7): Xaa is C or S
STPPTXXVPTRLSPINILYF

SEQ ID NO: 3127 - protein, 9 aa, Artificial Sequence
  Non-cyclic GFR-binding peptide
TSPINMLYF

SEQ ID NO: 3128 - protein, 17 aa, Artificial Sequence
  Non-cyclic GFR-binding peptide
  MOD_RES (3)..(4): Xaa is C or S
ASXXVPARLSPINILYF

SEQ ID NO: 3129 - protein, 19 aa, Artificial Sequence
  Non-cyclic GFR-binding peptide
  MOD_RES (5)..(6): Xaa is C or S
VGKAXXVPTKLSPINVLYF

SEQ ID NO: 3130 - protein, 14 aa, Artificial Sequence
  Non-cyclic GFR-binding peptide
  MOD_RES (1)..(1): Xaa is C or S
XAPTKLSPINVLYF

SEQ ID NO: 3131 - protein, 20 aa, Artificial Sequence
  Non-cyclic GFR-binding peptide
  MOD_RES (7)..(7): Xaa is C or S
HVTKPTXAPTKLSPINVLYF

SEQ ID NO: 3132 - protein, 20 aa, Artificial Sequence
  Non-cyclic GFR-binding peptide
  MOD_RES (6)..(7): Xaa is C or S
AVPKAXXAPTKLSPINVLYF

SEQ ID NO: 3133 - protein, 19 aa, Artificial Sequence
  Non-cyclic GFR-binding peptide
  MOD_RES (5)..(6): Xaa is C or S
TPPTXXVPTRLSPINILYF

SEQ ID NO: 3134 - protein, 14 aa, Artificial Sequence
  Non-cyclic GFR-binding peptide
  MOD_RES (1)..(1): Xaa is C or S
XVPARLSPINILYF

SEQ ID NO: 3135 - protein, 17 aa, Artificial Sequence
  Non-cyclic GFR-binding peptide
  MOD_RES (3)..(4): Xaa is C or S
KAXXVPTKLSPINVLYF

SEQ ID NO: 3136 - protein, 19 aa, Artificial Sequence
  Non-cyclic GFR-binding peptide
  MOD_RES (5)..(6): Xaa is C or S
VPKPXXAPTKLSPINVLYF

SEQ ID NO: 3137 - protein, 19 aa, Artificial Sequence
  Non-cyclic GFR-binding peptide
  MOD_RES (5)..(6): Xaa is C or S
ASKAXXVPTKLSPINILYF

SEQ ID NO: 3138 - protein, 20 aa, Artificial Sequence
  Non-cyclic GFR-binding peptide
  MOD_RES (6)..(7): Xaa is C or S
RVPSTXXAPVKTSPINMLYF

SEQ ID NO: 3139 - protein, 14 aa, Artificial Sequence
  Non-cyclic GFR-binding peptide
  MOD_RES (14)..(14): Xaa is C or S
IYLISIPSLRTPVX

SEQ ID NO: 3140 - protein, 20 aa, Artificial Sequence
  Non-cyclic GFR-binding peptide
  MOD_RES (14)..(15): Xaa is C or S
IYLMSIPSMKTPTXXPGASG

SEQ ID NO: 3141 - protein, 11 aa, Artificial Sequence
  Non-cyclic GFR-binding peptide
IYLMSIPSMKT

SEQ ID NO: 3142 - protein, 15 aa, Artificial Sequence
  Non-cyclic GFR-binding peptide
  MOD_RES (14)..(15): Xaa is C or S
IYLMSIPSTKVPAXX

SEQ ID NO: 3143 - protein, 10 aa, Artificial Sequence
  Non-cyclic GFR-binding peptide
IYLMSIPSMK

SEQ ID NO: 3144 - protein, 13 aa, Artificial Sequence
  Non-cyclic GFR-binding peptide
IYLMSIPSMKTPT

SEQ ID NO: 3145 - protein, 17 aa, Artificial Sequence
  Non-cyclic GFR-binding peptide
  MOD_RES (14)..(15): Xaa is C or S
IYLMSIPSMKTPTXXPG

SEQ ID NO: 3146 - protein, 14 aa, Artificial Sequence
  Non-cyclic GFR-binding peptide
  MOD_RES (14)..(14): Xaa is C or S
IYLMSIPSTKVPAX

SEQ ID NO: 3147 - protein, 19 aa, Artificial Sequence
  Non-cyclic GFR-binding peptide
  MOD_RES (14)..(15): Xaa is C or S
IYLISIPSLRTPVXXTPPT

SEQ ID NO: 3148 - protein, 20 aa, Artificial Sequence
  Non-cyclic GFR-binding peptide
  MOD_RES (14)..(15): Xaa is C or S
IYLVSIPSLKTPAXXPKPVH

SEQ ID NO: 3149 - protein, 9 aa, Artificial Sequence
  Non-cyclic GFR-binding peptide
IYLMSIPSM

SEQ ID NO: 3150 - protein, 12 aa, Artificial Sequence
  Non-cyclic GFR-binding peptide
IYLISIPSLRTP

SEQ ID NO: 3151 - protein, 19 aa, Artificial Sequence
  Non-cyclic GFR-binding peptide
  MOD_RES (14)..(15): Xaa is C or S
IYLMSIPSTKVPAXXTSPV

SEQ ID NO: 3152 - protein, 11 aa, Artificial Sequence
  Non-cyclic GFR-binding peptide
IYLMSIPSTKV

SEQ ID NO: 3153 - protein, 20 aa, Artificial Sequence
  Non-cyclic GFR-binding peptide
  MOD_RES (14)..(15): Xaa is C or S
IYLMSIPSTKVPAXXTSPVR

SEQ ID NO: 3154 - protein, 18 aa, Artificial Sequence
  Non-cyclic GFR-binding peptide
  MOD_RES (14)..(15): Xaa is C or S
IYLMSIPSTKVPAXXTSP

SEQ ID NO: 3155 - protein, 10 aa, Artificial Sequence
  Non-cyclic GFR-binding peptide
IYLMSIPSTK

SEQ ID NO: 3156 - protein, 12 aa, Artificial Sequence
  Non-cyclic GFR-binding peptide
IYLMSIPSTKVP

SEQ ID NO: 3157 - protein, 15 aa, Artificial Sequence
  Non-cyclic GFR-binding peptide
  MOD_RES (14)..(15): Xaa is C or S
IYLMSIPSMKTPTXX

SEQ ID NO: 3158 - protein, 16 aa, Artificial Sequence
  Non-cyclic GFR-binding peptide
  MOD_RES (14)..(15): Xaa is C or S
IYLMSIPSMKTPTXXP

SEQ ID NO: 3159 - protein, 18 aa, Artificial Sequence
  Non-cyclic GFR-binding peptide
  MOD_RES (14)..(15): Xaa is C or S
IYLISIPSLRTPVXXTPP

SEQ ID NO: 3160 - protein, 15 aa, Artificial Sequence
  Non-cyclic GFR-binding peptide
  MOD_RES (14)..(15): Xaa is C or S
IYLISIPSLRTPVXX

SEQ ID NO: 3161 - protein, 13 aa, Artificial Sequence
  Non-cyclic GFR-binding peptide
IYLISIPSLRTPV

SEQ ID NO: 3162 - protein, 16 aa, Artificial Sequence
  Non-cyclic GFR-binding peptide
  MOD_RES (14)..(15): Xaa is C or S
IYLISIPSLRTPVXXT

SEQ ID NO: 3163 - protein, 18 aa, Artificial Sequence
  Non-cyclic GFR-binding peptide
  MOD_RES (14)..(15): Xaa is C or S
IYLMSIPSMKTPTXXPGA

SEQ ID NO: 3164 - protein, 20 aa, Artificial Sequence
  Non-cyclic GFR-binding peptide
  MOD_RES (14)..(15): Xaa is C or S
IYLISIPSLRTPVXXTPPTS

SEQ ID NO: 3165 - protein, 13 aa, Artificial Sequence
  Non-cyclic GFR-binding peptide
IYLMSIPSTKVPA

SEQ ID NO: 3166 - protein, 9 aa, Artificial Sequence
  Non-cyclic GFR-binding peptide
IYLMSIPST

SEQ ID NO: 3167 - protein, 16 aa, Artificial Sequence
  Non-cyclic GFR-binding peptide
  MOD_RES (14)..(15): Xaa is C or S
IYLMSIPSTKVPAXXT

SEQ ID NO: 3168 - protein, 11 aa, Artificial Sequence
  Non-cyclic GFR-binding peptide
IYLISIPSLRT

SEQ ID NO: 3169 - protein, 17 aa, Artificial Sequence
  Non-cyclic GFR-binding peptide
  MOD_RES (14)..(15): Xaa is C or S
IYLISIPSLRTPVXXTP

SEQ ID NO: 3170 - protein, 17 aa, Artificial Sequence
  Non-cyclic GFR-binding peptide
  MOD_RES (14)..(15): Xaa is C or S
IYLMSIPSTKVPAXXTS

SEQ ID NO: 3171 - protein, 14 aa, Artificial Sequence
  Non-cyclic GFR-binding peptide
  MOD_RES (14)..(14): Xaa is C or S
IYLMSIPSMKTPTX

SEQ ID NO: 3172 - protein, 12 aa, Artificial Sequence
  Non-cyclic GFR-binding peptide
IYLMSIPSMKTP

SEQ ID NO: 3173 - protein, 19 aa, Artificial Sequence
  Non-cyclic GFR-binding peptide
  MOD_RES (14)..(15): Xaa is C or S
IYLMSIPSMKTPTXXPGAS

SEQ ID NO: 3174 - protein, 14 aa, Artificial Sequence
  Non-cyclic GFR-binding peptide
  MOD_RES (1)..(1): Xaa is C or S
XVPTRLSPISILYI

SEQ ID NO: 3175 - protein, 20 aa, Artificial Sequence
  Non-cyclic GFR-binding peptide
  MOD_RES (6)..(7): Xaa is C or S
GSAGPXXTPTKMSPISMLYI

SEQ ID NO: 3176 - protein, 11 aa, Artificial Sequence
  Non-cyclic GFR-binding peptide
TKMSPISMLYI

SEQ ID NO: 3177 - protein, 15 aa, Artificial Sequence
  Non-cyclic GFR-binding peptide
  MOD_RES (1)..(2): Xaa is C or S
XXAPVKTSPISMLYI

SEQ ID NO: 3178 - protein, 10 aa, Artificial Sequence
  Non-cyclic GFR-binding peptide
KMSPISMLYI

SEQ ID NO: 3179 - protein, 13 aa, Artificial Sequence
  Non-cyclic GFR-binding peptide
TPTKMSPISMLYI

SEQ ID NO: 3180 - protein, 17 aa, Artificial Sequence
  Non-cyclic GFR-binding peptide
  MOD_RES (3)..(4): Xaa is C or S
GPXXTPTKMSPISMLYI

SEQ ID NO: 3181 - protein, 14 aa, Artificial Sequence
  Non-cyclic GFR-binding peptide
  MOD_RES (1)..(1): Xaa is C or S
XAPVKTSPISMLYI

SEQ ID NO: 3182 - protein, 19 aa, Artificial Sequence
  Non-cyclic GFR-binding peptide
  MOD_RES (5)..(6): Xaa is C or S
TPPTXXVPTRLSPISILYI

SEQ ID NO: 3183 - protein, 20 aa, Artificial Sequence
  Non-cyclic GFR-binding peptide
  MOD_RES (6)..(7): Xaa is C or S
HVPKPXXAPTKLSPISVLYI

SEQ ID NO: 3184 - protein, 9 aa, Artificial Sequence
  Non-cyclic GFR-binding peptide
MSPISMLYI

SEQ ID NO: 3185 - protein, 12 aa, Artificial Sequence
  Non-cyclic GFR-binding peptide
PTRLSPISILYI

SEQ ID NO: 3186 - protein, 19 aa, Artificial Sequence
  Non-cyclic GFR-binding peptide
  MOD_RES (5)..(6): Xaa is C or S
VPSTXXAPVKTSPISMLYI

SEQ ID NO: 3187 - protein, 11 aa, Artificial Sequence
  Non-cyclic GFR-binding peptide
VKTSPISMLYI

SEQ ID NO: 3188 - protein, 20 aa, Artificial Sequence
  Non-cyclic GFR-binding peptide
  MOD_RES (6)..(7): Xaa is C or S
RVPSTXXAPVKTSPISMLYI

SEQ ID NO: 3189 - protein, 18 aa, Artificial Sequence
  Non-cyclic GFR-binding peptide
  MOD_RES (4)..(5): Xaa is C or S
PSTXXAPVKTSPISMLYI

SEQ ID NO: 3190 - protein, 10 aa, Artificial Sequence
  Non-cyclic GFR-binding peptide
KTSPISMLYI

SEQ ID NO: 3191 - protein, 12 aa, Artificial Sequence
  Non-cyclic GFR-binding peptide
PVKTSPISMLYI

SEQ ID NO: 3192 - protein, 15 aa, Artificial Sequence
  Non-cyclic GFR-binding peptide
  MOD_RES (1)..(2): Xaa is C or S
XXTPTKMSPISMLYI

SEQ ID NO: 3193 - protein, 16 aa, Artificial Sequence
  Non-cyclic GFR-binding peptide
  MOD_RES (2)..(3): Xaa is C or S
PXXTPTKMSPISMLYI

SEQ ID NO: 3194 - protein, 18 aa, Artificial Sequence
  Non-cyclic GFR-binding peptide
  MOD_RES (4)..(5): Xaa is C or S
PPTXXVPTRLSPISILYI

SEQ ID NO: 3195 - protein, 15 aa, Artificial Sequence
  Non-cyclic GFR-binding peptide
  MOD_RES (1)..(2): Xaa is C or S
XXVPTRLSPISILYI

SEQ ID NO: 3196 - protein, 13 aa, Artificial Sequence
  Non-cyclic GFR-binding peptide
VPTRLSPISILYI

SEQ ID NO: 3197 - protein, 16 aa, Artificial Sequence
  Non-cyclic GFR-binding peptide
  MOD_RES (2)..(3): Xaa is C or S
TXXVPTRLSPISILYI

SEQ ID NO: 3198 - protein, 18 aa, Artificial Sequence
  Non-cyclic GFR-binding peptide
  MOD_RES (4)..(5): Xaa is C or S
AGPXXTPTKMSPISMLYI

SEQ ID NO: 3199 - protein, 20 aa, Artificial Sequence
  Non-cyclic GFR-binding peptide
  MOD_RES (6)..(7): Xaa is C or S
STPPTXXVPTRLSPISILYI

SEQ ID NO: 3200 - protein, 13 aa, Artificial Sequence
  Non-cyclic GFR-binding peptide
APVKTSPISMLYI

SEQ ID NO: 3201 - protein, 9 aa, Artificial Sequence
  Non-cyclic GFR-binding peptide
TSPISMLYI

SEQ ID NO: 3202 - protein, 16 aa, Artificial Sequence
  Non-cyclic GFR-binding peptide
  MOD_RES (2)..(3): Xaa is C or S
TXXAPVKTSPISMLYI

SEQ ID NO: 3203 - protein, 11 aa, Artificial Sequence
  Non-cyclic GFR-binding peptide
TRLSPISILYI

SEQ ID NO: 3204 - protein, 17 aa, Artificial Sequence
  Non-cyclic GFR-binding peptide
  MOD_RES (3)..(4): Xaa is C or S
PTXXVPTRLSPISILYI

SEQ ID NO: 3205 - protein, 17 aa, Artificial Sequence
  Non-cyclic GFR-binding peptide
  MOD_RES (3)..(4): Xaa is C or S
STXXAPVKTSPISMLYI

SEQ ID NO: 3206 - protein, 14 aa, Artificial Sequence
  Non-cyclic GFR-binding peptide
  MOD_RES (1)..(1): Xaa is C or S
XTPTKMSPISMLYI

SEQ ID NO: 3207 - protein, 12 aa, Artificial Sequence
  Non-cyclic GFR-binding peptide
PTKMSPISMLYI

SEQ ID NO: 3208 - protein, 19 aa, Artificial Sequence
  Non-cyclic GFR-binding peptide
  MOD_RES (5)..(6): Xaa is C or S
SAGPXXTPTKMSPISMLYI

SEQ ID NO: 3209 - protein, 12 aa, Artificial Sequence
  Non-cyclic GFR-binding peptide
FFLISLSSLRAP

SEQ ID NO: 3210 - protein, 15 aa, Artificial Sequence
  Non-cyclic GFR-binding peptide
  MOD_RES (14)..(14): Xaa is C or S
FFLVSLSSLKTPAXT

SEQ ID NO: 3211 - protein, 20 aa, Artificial Sequence
  Non-cyclic GFR-binding peptide
  MOD_RES (14)..(15): Xaa is C or S
FFLVSLSSLKTPAXXPKPVY

SEQ ID NO: 3212 - protein, 20 aa, Artificial Sequence
  Non-cyclic GFR-binding peptide
  MOD_RES (16)..(16): Xaa is C or S
FFLVSLSSHHVRSPQXKVSS

SEQ ID NO: 3213 - protein, 15 aa, Artificial Sequence
  Non-cyclic GFR-binding peptide
  MOD_RES (14)..(15): Xaa is C or S
FFLISLSSLDQPVXX

SEQ ID NO: 3214 - protein, 12 aa, Artificial Sequence
  Non-cyclic GFR-binding peptide
FFLMSLSSLETP

SEQ ID NO: 3215 - protein, 10 aa, Artificial Sequence
  Non-cyclic GFR-binding peptide
FFLISLSSLK

SEQ ID NO: 3216 - protein, 20 aa, Artificial Sequence
  Non-cyclic GFR-binding peptide
  MOD_RES (14)..(15): Xaa is C or S
FFLISLSSLAQPVXXPAASA

SEQ ID NO: 3217 - protein, 9 aa, Artificial Sequence
  Non-cyclic GFR-binding peptide
FFLMSLSSL

SEQ ID NO: 3218 - protein, 18 aa, Artificial Sequence
  Non-cyclic GFR-binding peptide
  MOD_RES (14)..(14): Xaa is C or S
FFLMSLSSEETPVXELGE

SEQ ID NO: 3219 - protein, 19 aa, Artificial Sequence
  Non-cyclic GFR-binding peptide
  MOD_RES (14)..(15): Xaa is C or S
FFLVSLSSLKTPAXXAKPV

SEQ ID NO: 3220 - protein, 12 aa, Artificial Sequence
  Non-cyclic GFR-binding peptide
FFLVSLSSHHVR

SEQ ID NO: 3221 - protein, 15 aa, Artificial Sequence
  Non-cyclic GFR-binding peptide
  MOD_RES (14)..(15): Xaa is C or S
FFLISLSSLDQSVXX

SEQ ID NO: 3222 - protein, 14 aa, Artificial Sequence
  Non-cyclic GFR-binding peptide
  MOD_RES (14)..(14): Xaa is C or S
FFLMSLSSMKTPTX

SEQ ID NO: 3223 - protein, 13 aa, Artificial Sequence
  Non-cyclic GFR-binding peptide
FFLMSLSSTKVPA

SEQ ID NO: 3224 - protein, 20 aa, Artificial Sequence
  Non-cyclic GFR-binding peptide
  MOD_RES (14)..(15): Xaa is C or S
FFLISLSSLRTPVXXTPPTS

SEQ ID NO: 3225 - protein, 11 aa, Artificial Sequence
  Non-cyclic GFR-binding peptide
FFLISLSSLDQ

SEQ ID NO: 3226 - protein, 18 aa, Artificial Sequence
  Non-cyclic GFR-binding peptide
  MOD_RES (14)..(15): Xaa is C or S
FFLVSLSSLKTPAXXAKP

SEQ ID NO: 3227 - protein, 19 aa, Artificial Sequence
  Non-cyclic GFR-binding peptide
  MOD_RES (14)..(15): Xaa is C or S
FFLVSLSSLKTPVXXAKGV

SEQ ID NO: 3228 - protein, 16 aa, Artificial Sequence
  Non-cyclic GFR-binding peptide
  MOD_RES (14)..(15): Xaa is C or S
FFLMSLSSTKVPAXXT

SEQ ID NO: 3229 - protein, 18 aa, Artificial Sequence
  Non-cyclic GFR-binding peptide
  MOD_RES (14)..(14): Xaa is C or S
FFLVSLSSLKTPAXTPKT

SEQ ID NO: 3230 - protein, 12 aa, Artificial Sequence
  Non-cyclic GFR-binding peptide
FFLISLSSLDQS

SEQ ID NO: 3231 - protein, 20 aa, Artificial Sequence
  Non-cyclic GFR-binding peptide
  MOD_RES (14)..(14): Xaa is C or S
FFLMSLSSEETPVXELGEDN

SEQ ID NO: 3232 - protein, 10 aa, Artificial Sequence
  Non-cyclic GFR-binding peptide
FFLISLSSLR

SEQ ID NO: 3233 - protein, 17 aa, Artificial Sequence
  Non-cyclic GFR-binding peptide
  MOD_RES (16)..(16): Xaa is C or S
FFLVSLSSHHVRSPQXK

SEQ ID NO: 3234 - protein, 20 aa, Artificial Sequence
  Non-cyclic GFR-binding peptide
  MOD_RES (14)..(15): Xaa is C or S
FFLMSLSSLETPVXXAKPIS

SEQ ID NO: 3235 - protein, 13 aa, Artificial Sequence
  Non-cyclic GFR-binding peptide
FFLISLSSLAQPV

SEQ ID NO: 3236 - protein, 16 aa, Artificial Sequence
  Non-cyclic GFR-binding peptide
  MOD_RES (14)..(15): Xaa is C or S
FFLISLSSLDQPVXXP

SEQ ID NO: 3237 - protein, 15 aa, Artificial Sequence
  Non-cyclic GFR-binding peptide
  MOD_RES (14)..(15): Xaa is C or S
FFLISLSSLRAPVXX

SEQ ID NO: 3238 - protein, 11 aa, Artificial Sequence
  Non-cyclic GFR-binding peptide
FFLMSLSSLET

SEQ ID NO: 3239 - protein, 18 aa, Artificial Sequence
  Non-cyclic GFR-binding peptide
  MOD_RES (14)..(15): Xaa is C or S
FFLMSLSSMKTPTXXPGA

SEQ ID NO: 3240 - protein, 9 aa, Artificial Sequence
  Non-cyclic GFR-binding peptide
FFLMSLSSE

SEQ ID NO: 3241 - protein, 17 aa, Artificial Sequence
  Non-cyclic GFR-binding peptide
  MOD_RES (14)..(14): Xaa is C or S
FFLMSLSSEETPVXELG

SEQ ID NO: 3242 - protein, 11 aa, Artificial Sequence
  Non-cyclic GFR-binding peptide
FFLISLSSLRA

SEQ ID NO: 3243 - protein, 13 aa, Artificial Sequence
  Non-cyclic GFR-binding peptide
FFLISLSSLKTPV

SEQ ID NO: 3244 - protein, 13 aa, Artificial Sequence
  Non-cyclic GFR-binding peptide
FFLVSLSSLKTPA

SEQ ID NO: 3245 - protein, 15 aa, Artificial Sequence
  Non-cyclic GFR-binding peptide
  MOD_RES (14)..(15): Xaa is C or S
FFLMSLSSLETPVXX

SEQ ID NO: 3246 - protein, 16 aa, Artificial Sequence
  Non-cyclic GFR-binding peptide
  MOD_RES (14)..(15): Xaa is C or S
FFLMSLSSLETPVXXA

SEQ ID NO: 3247 - protein, 18 aa, Artificial Sequence
  Non-cyclic GFR-binding peptide
  MOD_RES (14)..(15): Xaa is C or S
FFLVSLSSLQTPAXXPKP

SEQ ID NO: 3248 - protein, 16 aa, Artificial Sequence
  Non-cyclic GFR-binding peptide
  MOD_RES (14)..(15): Xaa is C or S
FFLMSLSSMKTPTXXP

SEQ ID NO: 3249 - protein, 15 aa, Artificial Sequence
  Non-cyclic GFR-binding peptide
  MOD_RES (14)..(15): Xaa is C or S
FFLISLSSLRTPVXX

SEQ ID NO: 3250 - protein, 18 aa, Artificial Sequence
  Non-cyclic GFR-binding peptide
  MOD_RES (14)..(15): Xaa is C or S
FFLISLSSLRTPVXXTPP

SEQ ID NO: 3251 - protein, 13 aa, Artificial Sequence
  Non-cyclic GFR-binding peptide
FFLVSLSSLQTPA

SEQ ID NO: 3252 - protein, 16 aa, Artificial Sequence
  Non-cyclic GFR-binding peptide
  MOD_RES (14)..(14): Xaa is C or S
FFLVSLSSLKTPAXTP

SEQ ID NO: 3253 - protein, 15 aa, Artificial Sequence
  Non-cyclic GFR-binding peptide
  MOD_RES (14)..(15): Xaa is C or S
FFLVSLSSLKTPVXX

SEQ ID NO: 3254 - protein, 10 aa, Artificial Sequence
  Non-cyclic GFR-binding peptide
FFLMSLSSMK

SEQ ID NO: 3255 - protein, 20 aa, Artificial Sequence
  Non-cyclic GFR-binding peptide
  MOD_RES (14)..(15): Xaa is C or S
FFLMSLSSMKTPTXXPGASG

SEQ ID NO: 3256 - protein, 12 aa, Artificial Sequence
  Non-cyclic GFR-binding peptide
FFLVSLSSLQTP

SEQ ID NO: 3257 - protein, 16 aa, Artificial Sequence
  Non-cyclic GFR-binding peptide
  MOD_RES (14)..(15): Xaa is C or S
FFLISLSSLRAPVXXS

SEQ ID NO: 3258 - protein, 14 aa, Artificial Sequence
  Non-cyclic GFR-binding peptide
  MOD_RES (14)..(14): Xaa is C or S
FFLISLSSLDQPVX

SEQ ID NO: 3259 - protein, 19 aa, Artificial Sequence
  Non-cyclic GFR-binding peptide
  MOD_RES (14)..(15): Xaa is C or S
FFLVSLSSLQTPAXXPKPV

SEQ ID NO: 3260 - protein, 15 aa, Artificial Sequence
  Non-cyclic GFR-binding peptide
  MOD_RES (14)..(15): Xaa is C or S
FFLMSLSSTKVPAXX

SEQ ID NO: 3261 - protein, 16 aa, Artificial Sequence
  Non-cyclic GFR-binding peptide
  MOD_RES (14)..(14): Xaa is C or S
FFLMSLSSEETPVXEL

SEQ ID NO: 3262 - protein, 14 aa, Artificial Sequence
  Non-cyclic GFR-binding peptide
  MOD_RES (14)..(14): Xaa is C or S
FFLMSLSSLETPVX

SEQ ID NO: 3263 - protein, 14 aa, Artificial Sequence
  Non-cyclic GFR-binding peptide
  MOD_RES (14)..(14): Xaa is C or S
FFLVSLSSLQTPAX

SEQ ID NO: 3264 - protein, 14 aa, Artificial Sequence
  Non-cyclic GFR-binding peptide
  MOD_RES (14)..(14): Xaa is C or S
FFLISLSSLAQPVX

SEQ ID NO: 3265 - protein, 10 aa, Artificial Sequence
  Non-cyclic GFR-binding peptide
FFLVSLSSLK

SEQ ID NO: 3266 - protein, 16 aa, Artificial Sequence
  Non-cyclic GFR-binding peptide
  MOD_RES (14)..(15): Xaa is C or S
FFLISLSSLDQSVXXP

SEQ ID NO: 3267 - protein, 19 aa, Artificial Sequence
  Non-cyclic GFR-binding peptide
  MOD_RES (14)..(15): Xaa is C or S
FFLISLSSLDQPVXXPSAS

SEQ ID NO: 3268 - protein, 14 aa, Artificial Sequence
  Non-cyclic GFR-binding peptide
FFLVSLSSHHVRSP

SEQ ID NO: 3269 - protein, 18 aa, Artificial Sequence
  Non-cyclic GFR-binding peptide
  MOD_RES (14)..(15): Xaa is C or S
FFLISLSSLKTPVXXAKS

SEQ ID NO: 3270 - protein, 13 aa, Artificial Sequence
  Non-cyclic GFR-binding peptide
FFLVSLSSHHVRS

SEQ ID NO: 3271 - protein, 15 aa, Artificial Sequence
  Non-cyclic GFR-binding peptide
FFLVSLSSHHVRSPQ

SEQ ID NO: 3272 - protein, 16 aa, Artificial Sequence
  Non-cyclic GFR-binding peptide
  MOD_RES (14)..(15): Xaa is C or S
FFLISLSSLKTPVXXA

SEQ ID NO: 3273 - protein, 14 aa, Artificial Sequence
  Non-cyclic GFR-binding peptide
  MOD_RES (14)..(14): Xaa is C or S
FFLISLSSLKTPVX

SEQ ID NO: 3274 - protein, 13 aa, Artificial Sequence
  Non-cyclic GFR-binding peptide
FFLVSLSSLKTPV

SEQ ID NO: 3275 - protein, 17 aa, Artificial Sequence
  Non-cyclic GFR-binding peptide
  MOD_RES (14)..(15): Xaa is C or S
FFLVSLSSLQTPAXXPK

SEQ ID NO: 3276 - protein, 11 aa, Artificial Sequence
  Non-cyclic GFR-binding peptide
FFLVSLSSLQT

SEQ ID NO: 3277 - protein, 17 aa, Artificial Sequence
  Non-cyclic GFR-binding peptide
  MOD_RES (14)..(15): Xaa is C or S
FFLVSLSSLKTPAXXAK

SEQ ID NO: 3278 - protein, 13 aa, Artificial Sequence
  Non-cyclic GFR-binding peptide
FFLISLSSLRTPV

SEQ ID NO: 3279 - protein, 10 aa, Artificial Sequence
  Non-cyclic GFR-binding peptide
FFLMSLSSTK

SEQ ID NO: 3280 - protein, 15 aa, Artificial Sequence
  Non-cyclic GFR-binding peptide
  MOD_RES (14)..(15): Xaa is C or S
FFLMSLSSMKTPTXX

SEQ ID NO: 3281 - protein, 18 aa, Artificial Sequence
  Non-cyclic GFR-binding peptide
  MOD_RES (14)..(15): Xaa is C or S
FFLISLSSLAQPVXXPAA

SEQ ID NO: 3282 - protein, 12 aa, Artificial Sequence
  Non-cyclic GFR-binding peptide
FFLISLSSLDQP

SEQ ID NO: 3283 - protein, 12 aa, Artificial Sequence
  Non-cyclic GFR-binding peptide
FFLMSLSSEETP

SEQ ID NO: 3284 - protein, 13 aa, Artificial Sequence
  Non-cyclic GFR-binding peptide
FFLMSLSSMKTPT

SEQ ID NO: 3285 - protein, 20 aa, Artificial Sequence
  Non-cyclic GFR-binding peptide
  MOD_RES (14)..(15): Xaa is C or S
FFLMSLSSLETPVXXAKPIK

SEQ ID NO: 3286 - protein, 18 aa, Artificial Sequence
  Non-cyclic GFR-binding peptide
  MOD_RES (14)..(15): Xaa is C or S
FFLMSLSSTKVPAXXTSP

SEQ ID NO: 3287 - protein, 16 aa, Artificial Sequence
  Non-cyclic GFR-binding peptide
  MOD_RES (14)..(15): Xaa is C or S
FFLVSLSSLKTPVXXA

SEQ ID NO: 3288 - protein, 14 aa, Artificial Sequence
  Non-cyclic GFR-binding peptide
  MOD_RES (14)..(14): Xaa is C or S
FFLMSLSSEETPVX

SEQ ID NO: 3289 - protein, 16 aa, Artificial Sequence
  Non-cyclic GFR-binding peptide
  MOD_RES (14)..(15): Xaa is C or S
FFLVSLSSLKTPAXXP

SEQ ID NO: 3290 - protein, 17 aa, Artificial Sequence
  Non-cyclic GFR-binding peptide
  MOD_RES (14)..(15): Xaa is C or S
FFLMSLSSMKTPTXXPG

SEQ ID NO: 3291 - protein, 12 aa, Artificial Sequence
  Non-cyclic GFR-binding peptide
FFLISLSSLKTP

SEQ ID NO: 3292 - protein, 20 aa, Artificial Sequence
  Non-cyclic GFR-binding peptide
  MOD_RES (14)..(15): Xaa is C or S
FFLVSLSSLQTPAXXPKPVT

SEQ ID NO: 3293 - protein, 16 aa, Artificial Sequence
  Non-cyclic GFR-binding peptide
  MOD_RES (14)..(15): Xaa is C or S
FFLVSLSSLQTPAXXP

SEQ ID NO: 3294 - protein, 20 aa, Artificial Sequence
  Non-cyclic GFR-binding peptide
  MOD_RES (14)..(15): Xaa is C or S
FFLVSLSSLKTPVXXAKGVK

SEQ ID NO: 3295 - protein, 10 aa, Artificial Sequence
  Non-cyclic GFR-binding peptide
FFLMSLSSLE

SEQ ID NO: 3296 - protein, 16 aa, Artificial Sequence
  Non-cyclic GFR-binding peptide
  MOD_RES (16)..(16): Xaa is C or S
FFLVSLSSHHVRSPQX

SEQ ID NO: 3297 - protein, 18 aa, Artificial Sequence
  Non-cyclic GFR-binding peptide
  MOD_RES (14)..(15): Xaa is C or S
FFLISLSSLDQSVXXPSA

SEQ ID NO: 3298 - protein, 18 aa, Artificial Sequence
  Non-cyclic GFR-binding peptide
  MOD_RES (14)..(15): Xaa is C or S
FFLISLSSLDQPVXXPSA

SEQ ID NO: 3299 - protein, 14 aa, Artificial Sequence
  Non-cyclic GFR-binding peptide
  MOD_RES (14)..(14): Xaa is C or S
FFLVSLSSLKTPVX

SEQ ID NO: 3300 - protein, 15 aa, Artificial Sequence
  Non-cyclic GFR-binding peptide
  MOD_RES (14)..(15): Xaa is C or S
FFLISLSSLAQPVXX

SEQ ID NO: 3301 - protein, 17 aa, Artificial Sequence
  Non-cyclic GFR-binding peptide
  MOD_RES (14)..(15): Xaa is C or S
FFLISLSSLDQSVXXPS

SEQ ID NO: 3302 - protein, 11 aa, Artificial Sequence
  Non-cyclic GFR-binding peptide
FFLMSLSSMKT

SEQ ID NO: 3303 - protein, 9 aa, Artificial Sequence
  Non-cyclic GFR-binding peptide
FFLISLSSL

SEQ ID NO: 3304 - protein, 20 aa, Artificial Sequence
  Non-cyclic GFR-binding peptide
  MOD_RES (14)..(15): Xaa is C or S
FFLMSLSSTKVPAXXTSPVR

SEQ ID NO: 3305 - protein, 13 aa, Artificial Sequence
  Non-cyclic GFR-binding peptide
FFLISLSSLDQSV

SEQ ID NO: 3306 - protein, 17 aa, Artificial Sequence
  Non-cyclic GFR-binding peptide
  MOD_RES (14)..(14): Xaa is C or S
FFLVSLSSLKTPAXTPK

SEQ ID NO: 3307 - protein, 18 aa, Artificial Sequence
  Non-cyclic GFR-binding peptide
  MOD_RES (16)..(16): Xaa is C or S
FFLVSLSSHHVRSPQXKV

SEQ ID NO: 3308 - protein, 12 aa, Artificial Sequence
  Non-cyclic GFR-binding peptide
FFLISLSSLAQP

SEQ ID NO: 3309 - protein, 19 aa, Artificial Sequence
  Non-cyclic GFR-binding peptide
  MOD_RES (14)..(14): Xaa is C or S
FFLVSLSSLKTPAXTPKTV

SEQ ID NO: 3310 - protein, 11 aa, Artificial Sequence
  Non-cyclic GFR-binding peptide
FFLISLSSLAQ

SEQ ID NO: 3311 - protein, 16 aa, Artificial Sequence
  Non-cyclic GFR-binding peptide
  MOD_RES (14)..(15): Xaa is C or S
FFLISLSSLRTPVXXT

SEQ ID NO: 3312 - protein, 18 aa, Artificial Sequence
  Non-cyclic GFR-binding peptide
  MOD_RES (14)..(15): Xaa is C or S
FFLISLSSLRAPVXXSAP

SEQ ID NO: 3313 - protein, 18 aa, Artificial Sequence
  Non-cyclic GFR-binding peptide
  MOD_RES (14)..(15): Xaa is C or S
FFLMSLSSLETPVXXAKP

SEQ ID NO: 3314 - protein, 11 aa, Artificial Sequence
  Non-cyclic GFR-binding peptide
FFLMSLSSTKV

SEQ ID NO: 3315 - protein, 17 aa, Artificial Sequence
  Non-cyclic GFR-binding peptide
  MOD_RES (14)..(15): Xaa is C or S
FFLISLSSLRAPVXXSA

SEQ ID NO: 3316 - protein, 19 aa, Artificial Sequence
  Non-cyclic GFR-binding peptide
  MOD_RES (14)..(15): Xaa is C or S
FFLISLSSLAQPVXXPAAS

SEQ ID NO: 3317 - protein, 17 aa, Artificial Sequence
  Non-cyclic GFR-binding peptide
  MOD_RES (14)..(15): Xaa is C or S
FFLISLSSLAQPVXXPA

SEQ ID NO: 3318 - protein, 12 aa, Artificial Sequence
  Non-cyclic GFR-binding peptide
FFLMSLSSTKVP

SEQ ID NO: 3319 - protein, 17 aa, Artificial Sequence
  Non-cyclic GFR-binding peptide
  MOD_RES (14)..(15): Xaa is C or S
FFLISLSSLRTPVXXTP

SEQ ID NO: 3320 - protein, 19 aa, Artificial Sequence
  Non-cyclic GFR-binding peptide
  MOD_RES (14)..(15): Xaa is C or S
FFLMSLSSLETPVXXAKPI

SEQ ID NO: 3321 - protein, 15 aa, Artificial Sequence
  Non-cyclic GFR-binding peptide
  MOD_RES (14)..(15): Xaa is C or S
FFLVSLSSLQTPAXX

SEQ ID NO: 3322 - protein, 19 aa, Artificial Sequence
  Non-cyclic GFR-binding peptide
  MOD_RES (14)..(15): Xaa is C or S
FFLMSLSSTKVPAXXTSPV

SEQ ID NO: 3323 - protein, 10 aa, Artificial Sequence
  Non-cyclic GFR-binding peptide
FFLVSLSSHH

SEQ ID NO: 3324 - protein, 17 aa, Artificial Sequence
  Non-cyclic GFR-binding peptide
  MOD_RES (14)..(15): Xaa is C or S
FFLMSLSSTKVPAXXTS

SEQ ID NO: 3325 - protein, 11 aa, Artificial Sequence
  Non-cyclic GFR-binding peptide
FFLMSLSSEET

SEQ ID NO: 3326 - protein, 13 aa, Artificial Sequence
  Non-cyclic GFR-binding peptide
FFLISLSSLRAPV

SEQ ID NO: 3327 - protein, 15 aa, Artificial Sequence
  Non-cyclic GFR-binding peptide
  MOD_RES (14)..(15): Xaa is C or S
FFLISLSSLKTPVXX

SEQ ID NO: 3328 - protein, 14 aa, Artificial Sequence
  Non-cyclic GFR-binding peptide
  MOD_RES (14)..(14): Xaa is C or S
FFLISLSSLRTPVX

SEQ ID NO: 3329 - protein, 20 aa, Artificial Sequence
  Non-cyclic GFR-binding peptide
  MOD_RES (14)..(15): Xaa is C or S
FFLISLSSLKTPVXXAKSAK

SEQ ID NO: 3330 - protein, 10 aa, Artificial Sequence
  Non-cyclic GFR-binding peptide
FFLISLSSLA

SEQ ID NO: 3331 - protein, 12 aa, Artificial Sequence
  Non-cyclic GFR-binding peptide
FFLVSLSSLKTP

SEQ ID NO: 3332 - protein, 20 aa, Artificial Sequence
  Non-cyclic GFR-binding peptide
  MOD_RES (14)..(15): Xaa is C or S
FFLVSLSSLKTPAXXPKPVH

SEQ ID NO: 3333 - protein, 12 aa, Artificial Sequence
  Non-cyclic GFR-binding peptide
FFLISLSSLRTP

SEQ ID NO: 3334 - protein, 15 aa, Artificial Sequence
  Non-cyclic GFR-binding peptide
  MOD_RES (14)..(15): Xaa is C or S
FFLVSLSSLKTPAXX

SEQ ID NO: 3335 - protein, 14 aa, Artificial Sequence
  Non-cyclic GFR-binding peptide
  MOD_RES (14)..(14): Xaa is C or S
FFLISLSSLDQSVX

SEQ ID NO: 3336 - protein, 19 aa, Artificial Sequence
  Non-cyclic GFR-binding peptide
  MOD_RES (14)..(15): Xaa is C or S
FFLISLSSLRAPVXXSAPA

SEQ ID NO: 3337 - protein, 13 aa, Artificial Sequence
  Non-cyclic GFR-binding peptide
FFLMSLSSLETPV

SEQ ID NO: 3338 - protein, 18 aa, Artificial Sequence
  Non-cyclic GFR-binding peptide
  MOD_RES (14)..(15): Xaa is C or S
FFLVSLSSLKTPAXXPKP

SEQ ID NO: 3339 - protein, 16 aa, Artificial Sequence
  Non-cyclic GFR-binding peptide
  MOD_RES (14)..(15): Xaa is C or S
FFLVSLSSLKTPAXXA

SEQ ID NO: 3340 - protein, 19 aa, Artificial Sequence
  Non-cyclic GFR-binding peptide
  MOD_RES (14)..(15): Xaa is C or S
FFLISLSSLDQSVXXPSAS

SEQ ID NO: 3341 - protein, 9 aa, Artificial Sequence
  Non-cyclic GFR-binding peptide
FFLVSLSSL

SEQ ID NO: 3342 - protein, 14 aa, Artificial Sequence
  Non-cyclic GFR-binding peptide
  MOD_RES (14)..(14): Xaa is C or S
FFLISLSSLRAPVX

SEQ ID NO: 3343 - protein, 10 aa, Artificial Sequence
  Non-cyclic GFR-binding peptide
FFLISLSSLD

SEQ ID NO: 3344 - protein, 17 aa, Artificial Sequence
  Non-cyclic GFR-binding peptide
  MOD_RES (14)..(15): Xaa is C or S
FFLVSLSSLKTPVXXAK

SEQ ID NO: 3345 - protein, 19 aa, Artificial Sequence
  Non-cyclic GFR-binding peptide
  MOD_RES (14)..(15): Xaa is C or S
FFLVSLSSLKTPAXXPKPV

SEQ ID NO: 3346 - protein, 19 aa, Artificial Sequence
  Non-cyclic GFR-binding peptide
  MOD_RES (14)..(14): Xaa is C or S
FFLMSLSSEETPVXELGED

SEQ ID NO: 3347 - protein, 14 aa, Artificial Sequence
  Non-cyclic GFR-binding peptide
  MOD_RES (14)..(14): Xaa is C or S
FFLVSLSSLKTPAX

SEQ ID NO: 3348 - protein, 11 aa, Artificial Sequence
  Non-cyclic GFR-binding peptide
FFLISLSSLKT

SEQ ID NO: 3349 - protein, 18 aa, Artificial Sequence
  Non-cyclic GFR-binding peptide
  MOD_RES (14)..(15): Xaa is C or S
FFLVSLSSLKTPVXXAKG

SEQ ID NO: 3350 - protein, 20 aa, Artificial Sequence
  Non-cyclic GFR-binding peptide
  MOD_RES (14)..(15): Xaa is C or S
FFLISLSSLDQSVXXPSASA

SEQ ID NO: 3351 - protein, 12 aa, Artificial Sequence
  Non-cyclic GFR-binding peptide
FFLMSLSSMKTP

SEQ ID NO: 3352 - protein, 19 aa, Artificial Sequence
  Non-cyclic GFR-binding peptide
  MOD_RES (16)..(16): Xaa is C or S
FFLVSLSSHHVRSPQXKVS

SEQ ID NO: 3353 - protein, 9 aa, Artificial Sequence
  Non-cyclic GFR-binding peptide
FFLMSLSST

SEQ ID NO: 3354 - protein, 13 aa, Artificial Sequence
  Non-cyclic GFR-binding peptide
FFLMSLSSEETPV

SEQ ID NO: 3355 - protein, 19 aa, Artificial Sequence
  Non-cyclic GFR-binding peptide
  MOD_RES (14)..(15): Xaa is C or S
FFLMSLSSMKTPTXXPGAS

SEQ ID NO: 3356 - protein, 17 aa, Artificial Sequence
  Non-cyclic GFR-binding peptide
  MOD_RES (14)..(15): Xaa is C or S
FFLMSLSSLETPVXXAK

SEQ ID NO: 3357 - protein, 20 aa, Artificial Sequence
  Non-cyclic GFR-binding peptide
  MOD_RES (14)..(15): Xaa is C or S
FFLISLSSLDQPVXXPSASA

SEQ ID NO: 3358 - protein, 11 aa, Artificial Sequence
  Non-cyclic GFR-binding peptide
FFLVSLSSLKT

SEQ ID NO: 3359 - protein, 16 aa, Artificial Sequence
  Non-cyclic GFR-binding peptide
  MOD_RES (14)..(15): Xaa is C or S
FFLISLSSLAQPVXXP

SEQ ID NO: 3360 - protein, 17 aa, Artificial Sequence
  Non-cyclic GFR-binding peptide
  MOD_RES (14)..(15): Xaa is C or S
FFLVSLSSLKTPAXXPK

SEQ ID NO: 3361 - protein, 10 aa, Artificial Sequence
  Non-cyclic GFR-binding peptide
FFLVSLSSLQ

SEQ ID NO: 3362 - protein, 20 aa, Artificial Sequence
  Non-cyclic GFR-binding peptide
  MOD_RES (14)..(15): Xaa is C or S
FFLVSLSSLKTPAXXAKPVA

SEQ ID NO: 3363 - protein, 19 aa, Artificial Sequence
  Non-cyclic GFR-binding peptide
  MOD_RES (14)..(15): Xaa is C or S
FFLISLSSLRTPVXXTPPT

SEQ ID NO: 3364 - protein, 17 aa, Artificial Sequence
  Non-cyclic GFR-binding peptide
  MOD_RES (14)..(15): Xaa is C or S
FFLISLSSLKTPVXXAK

SEQ ID NO: 3365 - protein, 13 aa, Artificial Sequence
  Non-cyclic GFR-binding peptide
FFLISLSSLDQPV

SEQ ID NO: 3366 - protein, 10 aa, Artificial Sequence
  Non-cyclic GFR-binding peptide
FFLMSLSSEE

SEQ ID NO: 3367 - protein, 19 aa, Artificial Sequence
  Non-cyclic GFR-binding peptide
  MOD_RES (14)..(15): Xaa is C or S
FFLISLSSLKTPVXXAKSA

SEQ ID NO: 3368 - protein, 15 aa, Artificial Sequence
  Non-cyclic GFR-binding peptide
  MOD_RES (14)..(14): Xaa is C or S
FFLMSLSSEETPVXE

SEQ ID NO: 3369 - protein, 20 aa, Artificial Sequence
  Non-cyclic GFR-binding peptide
  MOD_RES (14)..(15): Xaa is C or S
FFLISLSSLRAPVXXSAPAA

SEQ ID NO: 3370 - protein, 9 aa, Artificial Sequence
  Non-cyclic GFR-binding peptide
FFLMSLSSM

SEQ ID NO: 3371 - protein, 20 aa, Artificial Sequence
  Non-cyclic GFR-binding peptide
  MOD_RES (14)..(14): Xaa is C or S
FFLVSLSSLKTPAXTPKTVH

SEQ ID NO: 3372 - protein, 11 aa, Artificial Sequence
  Non-cyclic GFR-binding peptide
FFLISLSSLRT

SEQ ID NO: 3373 - protein, 9 aa, Artificial Sequence
  Non-cyclic GFR-binding peptide
FFLVSLSSH

SEQ ID NO: 3374 - protein, 17 aa, Artificial Sequence
  Non-cyclic GFR-binding peptide
  MOD_RES (14)..(15): Xaa is C or S
FFLISLSSLDQPVXXPS

SEQ ID NO: 3375 - protein, 14 aa, Artificial Sequence
  Non-cyclic GFR-binding peptide
  MOD_RES (14)..(14): Xaa is C or S
FFLMSLSSTKVPAX

SEQ ID NO: 3376 - protein, 11 aa, Artificial Sequence
  Non-cyclic GFR-binding peptide
FFLVSLSSHHV

SEQ ID NO: 3377 - protein, 12 aa, Artificial Sequence
  Non-cyclic GFR-binding peptide
PARLSSLSILFF

SEQ ID NO: 3378 - protein, 15 aa, Artificial Sequence
  Non-cyclic GFR-binding peptide
  MOD_RES (2)..(2): Xaa is C or S
TXAPTKLSSLSVLFF

SEQ ID NO: 3379 - protein, 20 aa, Artificial Sequence
  Non-cyclic GFR-binding peptide
  MOD_RES (6)..(7): Xaa is C or S
YVPKPXXAPTKLSSLSVLFF

SEQ ID NO: 3380 - protein, 20 aa, Artificial Sequence
  Non-cyclic GFR-binding peptide
  MOD_RES (5)..(5): Xaa is C or S
SSVKXQPSRVHHSSLSVLFF

SEQ ID NO: 3381 - protein, 15 aa, Artificial Sequence
  Non-cyclic GFR-binding peptide
  MOD_RES (1)..(2): Xaa is C or S
XXVPQDLSSLSILFF

SEQ ID NO: 3382 - protein, 12 aa, Artificial Sequence
  Non-cyclic GFR-binding peptide
PTELSSLSMLFF

SEQ ID NO: 3383 - protein, 10 aa, Artificial Sequence
  Non-cyclic GFR-binding peptide
KLSSLSILFF

SEQ ID NO: 3384 - protein, 20 aa, Artificial Sequence
  Non-cyclic GFR-binding peptide
  MOD_RES (6)..(7): Xaa is C or S
ASAAPXXVPQALSSLSILFF

SEQ ID NO: 3385 - protein, 9 aa, Artificial Sequence
  Non-cyclic GFR-binding peptide
LSSLSMLFF

SEQ ID NO: 3386 - protein, 18 aa, Artificial Sequence
  Non-cyclic GFR-binding peptide
  MOD_RES (5)..(5): Xaa is C or S
EGLEXVPTEESSLSMLFF

SEQ ID NO: 3387 - protein, 19 aa, Artificial Sequence
  Non-cyclic GFR-binding peptide
  MOD_RES (5)..(6): Xaa is C or S
VPKAXXAPTKLSSLSVLFF

SEQ ID NO: 3388 - protein, 12 aa, Artificial Sequence
  Non-cyclic GFR-binding peptide
RVHHSSLSVLFF

SEQ ID NO: 3389 - protein, 15 aa, Artificial Sequence
  Non-cyclic GFR-binding peptide
  MOD_RES (1)..(2): Xaa is C or S
XXVSQDLSSLSILFF

SEQ ID NO: 3390 - protein, 14 aa, Artificial Sequence
  Non-cyclic GFR-binding peptide
  MOD_RES (1)..(1): Xaa is C or S
XTPTKMSSLSMLFF

SEQ ID NO: 3391 - protein, 13 aa, Artificial Sequence
  Non-cyclic GFR-binding peptide
APVKTSSLSMLFF

SEQ ID NO: 3392 - protein, 20 aa, Artificial Sequence
  Non-cyclic GFR-binding peptide
  MOD_RES (6)..(7): Xaa is C or S
STPPTXXVPTRLSSLSILFF

SEQ ID NO: 3393 - protein, 11 aa, Artificial Sequence
  Non-cyclic GFR-binding peptide
QDLSSLSILFF

SEQ ID NO: 3394 - protein, 18 aa, Artificial Sequence
  Non-cyclic GFR-binding peptide
  MOD_RES (4)..(5): Xaa is C or S
PKAXXAPTKLSSLSVLFF

SEQ ID NO: 3395 - protein, 19 aa, Artificial Sequence
  Non-cyclic GFR-binding peptide
  MOD_RES (5)..(6): Xaa is C or S
VGKAXXVPTKLSSLSVLFF

SEQ ID NO: 3396 - protein, 16 aa, Artificial Sequence
  Non-cyclic GFR-binding peptide
  MOD_RES (2)..(3): Xaa is C or S
TXXAPVKTSSLSMLFF

SEQ ID NO: 3397 - protein, 18 aa, Artificial Sequence
  Non-cyclic GFR-binding peptide
  MOD_RES (5)..(5): Xaa is C or S
TKPTXAPTKLSSLSVLFF

SEQ ID NO: 3398 - protein, 12 aa, Artificial Sequence
  Non-cyclic GFR-binding peptide
SQDLSSLSILFF

SEQ ID NO: 3399 - protein, 20 aa, Artificial Sequence
  Non-cyclic GFR-binding peptide
  MOD_RES (7)..(7): Xaa is C or S
NDEGLEXVPTEESSLSMLFF

SEQ ID NO: 3400 - protein, 10 aa, Artificial Sequence
  Non-cyclic GFR-binding peptide
RLSSLSILFF

SEQ ID NO: 3401 - protein, 17 aa, Artificial Sequence
  Non-cyclic GFR-binding peptide
  MOD_RES (2)..(2): Xaa is C or S
KXQPSRVHHSSLSVLFF

SEQ ID NO: 3402 - protein, 20 aa, Artificial Sequence
  Non-cyclic GFR-binding peptide
  MOD_RES (6)..(7): Xaa is C or S
SIPKAXXVPTELSSLSMLFF

SEQ ID NO: 3403 - protein, 13 aa, Artificial Sequence
  Non-cyclic GFR-binding peptide
VPQALSSLSILFF

SEQ ID NO: 3404 - protein, 16 aa, Artificial Sequence
  Non-cyclic GFR-binding peptide
  MOD_RES (2)..(3): Xaa is C or S
PXXVPQDLSSLSILFF

SEQ ID NO: 3405 - protein, 15 aa, Artificial Sequence
  Non-cyclic GFR-binding peptide
  MOD_RES (1)..(2): Xaa is C or S
XXVPARLSSLSILFF

SEQ ID NO: 3406 - protein, 11 aa, Artificial Sequence
  Non-cyclic GFR-binding peptide
TELSSLSMLFF

SEQ ID NO: 3407 - protein, 18 aa, Artificial Sequence
  Non-cyclic GFR-binding peptide
  MOD_RES (4)..(5): Xaa is C or S
AGPXXTPTKMSSLSMLFF

SEQ ID NO: 3408 - protein, 9 aa, Artificial Sequence
  Non-cyclic GFR-binding peptide
ESSLSMLFF

SEQ ID NO: 3409 - protein, 17 aa, Artificial Sequence
  Non-cyclic GFR-binding peptide
  MOD_RES (4)..(4): Xaa is C or S
GLEXVPTEESSLSMLFF

SEQ ID NO: 3410 - protein, 11 aa, Artificial Sequence
  Non-cyclic GFR-binding peptide
ARLSSLSILFF

SEQ ID NO: 3411 - protein, 13 aa, Artificial Sequence
  Non-cyclic GFR-binding peptide
VPTKLSSLSILFF

SEQ ID NO: 3412 - protein, 13 aa, Artificial Sequence
  Non-cyclic GFR-binding peptide
APTKLSSLSVLFF

SEQ ID NO: 3413 - protein, 15 aa, Artificial Sequence
  Non-cyclic GFR-binding peptide
  MOD_RES (1)..(2): Xaa is C or S
XXVPTELSSLSMLFF

SEQ ID NO: 3414 - protein, 16 aa, Artificial Sequence
  Non-cyclic GFR-binding peptide
  MOD_RES (2)..(3): Xaa is C or S
AXXVPTELSSLSMLFF

SEQ ID NO: 3415 - protein, 18 aa, Artificial Sequence
  Non-cyclic GFR-binding peptide
  MOD_RES (4)..(5): Xaa is C or S
PKPXXAPTQLSSLSVLFF

SEQ ID NO: 3416 - protein, 16 aa, Artificial Sequence
  Non-cyclic GFR-binding peptide
  MOD_RES (2)..(3): Xaa is C or S
PXXTPTKMSSLSMLFF

SEQ ID NO: 3417 - protein, 15 aa, Artificial Sequence
  Non-cyclic GFR-binding peptide
  MOD_RES (1)..(2): Xaa is C or S
XXVPTRLSSLSILFF

SEQ ID NO: 3418 - protein, 18 aa, Artificial Sequence
  Non-cyclic GFR-binding peptide
  MOD_RES (4)..(5): Xaa is C or S
PPTXXVPTRLSSLSILFF

SEQ ID NO: 3419 - protein, 13 aa, Artificial Sequence
  Non-cyclic GFR-binding peptide
APTQLSSLSVLFF

SEQ ID NO: 3420 - protein, 16 aa, Artificial Sequence
  Non-cyclic GFR-binding peptide
  MOD_RES (3)..(3): Xaa is C or S
PTXAPTKLSSLSVLFF

SEQ ID NO: 3421 - protein, 15 aa, Artificial Sequence
  Non-cyclic GFR-binding peptide
  MOD_RES (1)..(2): Xaa is C or S
XXVPTKLSSLSVLFF

SEQ ID NO: 3422 - protein, 10 aa, Artificial Sequence
  Non-cyclic GFR-binding peptide
KMSSLSMLFF

SEQ ID NO: 3423 - protein, 20 aa, Artificial Sequence
  Non-cyclic GFR-binding peptide
  MOD_RES (6)..(7): Xaa is C or S
GSAGPXXTPTKMSSLSMLFF

SEQ ID NO: 3424 - protein, 12 aa, Artificial Sequence
  Non-cyclic GFR-binding peptide
PTQLSSLSVLFF

SEQ ID NO: 3425 - protein, 16 aa, Artificial Sequence
  Non-cyclic GFR-binding peptide
  MOD_RES (2)..(3): Xaa is C or S
SXXVPARLSSLSILFF

SEQ ID NO: 3426 - protein, 14 aa, Artificial Sequence
  Non-cyclic GFR-binding peptide
  MOD_RES (1)..(1): Xaa is C or S
XVPQDLSSLSILFF

SEQ ID NO: 3427 - protein, 19 aa, Artificial Sequence
  Non-cyclic GFR-binding peptide
  MOD_RES (5)..(6): Xaa is C or S
VPKPXXAPTQLSSLSVLFF

SEQ ID NO: 3428 - protein, 15 aa, Artificial Sequence
  Non-cyclic GFR-binding peptide
  MOD_RES (1)..(2): Xaa is C or S
XXAPVKTSSLSMLFF

SEQ ID NO: 3429 - protein, 16 aa, Artificial Sequence
  Non-cyclic GFR-binding peptide
  MOD_RES (3)..(3): Xaa is C or S
LEXVPTEESSLSMLFF

SEQ ID NO: 3430 - protein, 14 aa, Artificial Sequence
  Non-cyclic GFR-binding peptide
  MOD_RES (1)..(1): Xaa is C or S
XVPTELSSLSMLFF

SEQ ID NO: 3431 - protein, 14 aa, Artificial Sequence
  Non-cyclic GFR-binding peptide
  MOD_RES (1)..(1): Xaa is C or S
XAPTQLSSLSVLFF

SEQ ID NO: 3432 - protein, 14 aa, Artificial Sequence
  Non-cyclic GFR-binding peptide
  MOD_RES (1)..(1): Xaa is C or S
XVPQALSSLSILFF

SEQ ID NO: 3433 - protein, 10 aa, Artificial Sequence
  Non-cyclic GFR-binding peptide
KLSSLSVLFF

SEQ ID NO: 3434 - protein, 16 aa, Artificial Sequence
  Non-cyclic GFR-binding peptide
  MOD_RES (2)..(3): Xaa is C or S
PXXVSQDLSSLSILFF

SEQ ID NO: 3435 - protein, 19 aa, Artificial Sequence
  Non-cyclic GFR-binding peptide
  MOD_RES (5)..(6): Xaa is C or S
SASPXXVPQDLSSLSILFF

SEQ ID NO: 3436 - protein, 14 aa, Artificial Sequence
  Non-cyclic GFR-binding peptide
PSRVHHSSLSVLFF

SEQ ID NO: 3437 - protein, 18 aa, Artificial Sequence
  Non-cyclic GFR-binding peptide
  MOD_RES (4)..(5): Xaa is C or S
SKAXXVPTKLSSLSILFF

SEQ ID NO: 3438 - protein, 13 aa, Artificial Sequence
  Non-cyclic GFR-binding peptide
SRVHHSSLSVLFF

SEQ ID NO: 3439 - protein, 15 aa, Artificial Sequence
  Non-cyclic GFR-binding peptide
QPSRVHHSSLSVLFF

SEQ ID NO: 3440 - protein, 16 aa, Artificial Sequence
  Non-cyclic GFR-binding peptide
  MOD_RES (2)..(3): Xaa is C or S
AXXVPTKLSSLSILFF

SEQ ID NO: 3441 - protein, 14 aa, Artificial Sequence
  Non-cyclic GFR-binding peptide
  MOD_RES (1)..(1): Xaa is C or S
XVPTKLSSLSILFF

SEQ ID NO: 3442 - protein, 13 aa, Artificial Sequence
  Non-cyclic GFR-binding peptide
VPTKLSSLSVLFF

SEQ ID NO: 3443 - protein, 17 aa, Artificial Sequence
  Non-cyclic GFR-binding peptide
  MOD_RES (3)..(4): Xaa is C or S
KPXXAPTQLSSLSVLFF

SEQ ID NO: 3444 - protein, 11 aa, Artificial Sequence
  Non-cyclic GFR-binding peptide
TQLSSLSVLFF

SEQ ID NO: 3445 - protein, 17 aa, Artificial Sequence
  Non-cyclic GFR-binding peptide
  MOD_RES (3)..(4): Xaa is C or S
KAXXAPTKLSSLSVLFF

SEQ ID NO: 3446 - protein, 13 aa, Artificial Sequence
  Non-cyclic GFR-binding peptide
VPTRLSSLSILFF

SEQ ID NO: 3447 - protein, 10 aa, Artificial Sequence
  Non-cyclic GFR-binding peptide
KTSSLSMLFF

SEQ ID NO: 3448 - protein, 15 aa, Artificial Sequence
  Non-cyclic GFR-binding peptide
  MOD_RES (1)..(2): Xaa is C or S
XXTPTKMSSLSMLFF

SEQ ID NO: 3449 - protein, 18 aa, Artificial Sequence
  Non-cyclic GFR-binding peptide
  MOD_RES (4)..(5): Xaa is C or S
AAPXXVPQALSSLSILFF

SEQ ID NO: 3450 - protein, 12 aa, Artificial Sequence
  Non-cyclic GFR-binding peptide
PQDLSSLSILFF

SEQ ID NO: 3451 - protein, 12 aa, Artificial Sequence
  Non-cyclic GFR-binding peptide
PTEESSLSMLFF

SEQ ID NO: 3452 - protein, 13 aa, Artificial Sequence
  Non-cyclic GFR-binding peptide
TPTKMSSLSMLFF

SEQ ID NO: 3453 - protein, 20 aa, Artificial Sequence
  Non-cyclic GFR-binding peptide
  MOD_RES (6)..(7): Xaa is C or S
KIPKAXXVPTELSSLSMLFF

SEQ ID NO: 3454 - protein, 18 aa, Artificial Sequence
  Non-cyclic GFR-binding peptide
  MOD_RES (4)..(5): Xaa is C or S
PSTXXAPVKTSSLSMLFF

SEQ ID NO: 3455 - protein, 16 aa, Artificial Sequence
  Non-cyclic GFR-binding peptide
  MOD_RES (2)..(3): Xaa is C or S
AXXVPTKLSSLSVLFF

SEQ ID NO: 3456 - protein, 14 aa, Artificial Sequence
  Non-cyclic GFR-binding peptide
  MOD_RES (1)..(1): Xaa is C or S
XVPTEESSLSMLFF

SEQ ID NO: 3457 - protein, 16 aa, Artificial Sequence
  Non-cyclic GFR-binding peptide
  MOD_RES (2)..(3): Xaa is C or S
PXXAPTKLSSLSVLFF

SEQ ID NO: 3458 - protein, 17 aa, Artificial Sequence
  Non-cyclic GFR-binding peptide
  MOD_RES (3)..(4): Xaa is C or S
GPXXTPTKMSSLSMLFF

SEQ ID NO: 3459 - protein, 12 aa, Artificial Sequence
  Non-cyclic GFR-binding peptide
PTKLSSLSILFF

SEQ ID NO: 3460 - protein, 20 aa, Artificial Sequence
  Non-cyclic GFR-binding peptide
  MOD_RES (6)..(7): Xaa is C or S
TVPKPXXAPTQLSSLSVLFF

SEQ ID NO: 3461 - protein, 16 aa, Artificial Sequence
  Non-cyclic GFR-binding peptide
  MOD_RES (2)..(3): Xaa is C or S
PXXAPTQLSSLSVLFF

SEQ ID NO: 3462 - protein, 20 aa, Artificial Sequence
  Non-cyclic GFR-binding peptide
  MOD_RES (6)..(7): Xaa is C or S
KVGKAXXVPTKLSSLSVLFF

SEQ ID NO: 3463 - protein, 10 aa, Artificial Sequence
  Non-cyclic GFR-binding peptide
ELSSLSMLFF

SEQ ID NO: 3464 - protein, 16 aa, Artificial Sequence
  Non-cyclic GFR-binding peptide
  MOD_RES (1)..(1): Xaa is C or S
XQPSRVHHSSLSVLFF

SEQ ID NO: 3465 - protein, 18 aa, Artificial Sequence
  Non-cyclic GFR-binding peptide
  MOD_RES (4)..(5): Xaa is C or S
ASPXXVSQDLSSLSILFF

SEQ ID NO: 3466 - protein, 18 aa, Artificial Sequence
  Non-cyclic GFR-binding peptide
  MOD_RES (4)..(5): Xaa is C or S
ASPXXVPQDLSSLSILFF

SEQ ID NO: 3467 - protein, 14 aa, Artificial Sequence
  Non-cyclic GFR-binding peptide
  MOD_RES (1)..(1): Xaa is C or S
XVPTKLSSLSVLFF

SEQ ID NO: 3468 - protein, 15 aa, Artificial Sequence
  Non-cyclic GFR-binding peptide
  MOD_RES (1)..(2): Xaa is C or S
XXVPQALSSLSILFF

SEQ ID NO: 3469 - protein, 17 aa, Artificial Sequence
  Non-cyclic GFR-binding peptide
  MOD_RES (3)..(4): Xaa is C or S
SPXXVSQDLSSLSILFF

SEQ ID NO: 3470 - protein, 11 aa, Artificial Sequence
  Non-cyclic GFR-binding peptide
TKMSSLSMLFF

SEQ ID NO: 3471 - protein, 9 aa, Artificial Sequence
  Non-cyclic GFR-binding peptide
LSSLSILFF

SEQ ID NO: 3472 - protein, 20 aa, Artificial Sequence
  Non-cyclic GFR-binding peptide
  MOD_RES (6)..(7): Xaa is C or S
RVPSTXXAPVKTSSLSMLFF

SEQ ID NO: 3473 - protein, 13 aa, Artificial Sequence
  Non-cyclic GFR-binding peptide
VSQDLSSLSILFF

SEQ ID NO: 3474 - protein, 17 aa, Artificial Sequence
  Non-cyclic GFR-binding peptide
  MOD_RES (4)..(4): Xaa is C or S
KPTXAPTKLSSLSVLFF

SEQ ID NO: 3475 - protein, 18 aa, Artificial Sequence
  Non-cyclic GFR-binding peptide
  MOD_RES (3)..(3): Xaa is C or S
VKXQPSRVHHSSLSVLFF

SEQ ID NO: 3476 - protein, 12 aa, Artificial Sequence
  Non-cyclic GFR-binding peptide
PQALSSLSILFF

SEQ ID NO: 3477 - protein, 19 aa, Artificial Sequence
  Non-cyclic GFR-binding peptide
  MOD_RES (6)..(6): Xaa is C or S
VTKPTXAPTKLSSLSVLFF

SEQ ID NO: 3478 - protein, 11 aa, Artificial Sequence
  Non-cyclic GFR-binding peptide
QALSSLSILFF

SEQ ID NO: 3479 - protein, 16 aa, Artificial Sequence
  Non-cyclic GFR-binding peptide
  MOD_RES (2)..(3): Xaa is C or S
TXXVPTRLSSLSILFF

SEQ ID NO: 3480 - protein, 18 aa, Artificial Sequence
  Non-cyclic GFR-binding peptide
  MOD_RES (4)..(5): Xaa is C or S
PASXXVPARLSSLSILFF

SEQ ID NO: 3481 - protein, 18 aa, Artificial Sequence
  Non-cyclic GFR-binding peptide
  MOD_RES (4)..(5): Xaa is C or S
PKAXXVPTELSSLSMLFF

SEQ ID NO: 3482 - protein, 11 aa, Artificial Sequence
  Non-cyclic GFR-binding peptide
VKTSSLSMLFF

SEQ ID NO: 3483 - protein, 17 aa, Artificial Sequence
  Non-cyclic GFR-binding peptide
  MOD_RES (3)..(4): Xaa is C or S
ASXXVPARLSSLSILFF

SEQ ID NO: 3484 - protein, 19 aa, Artificial Sequence
  Non-cyclic GFR-binding peptide
  MOD_RES (5)..(6): Xaa is C or S
SAAPXXVPQALSSLSILFF

SEQ ID NO: 3485 - protein, 17 aa, Artificial Sequence
  Non-cyclic GFR-binding peptide
  MOD_RES (3)..(4): Xaa is C or S
APXXVPQALSSLSILFF

SEQ ID NO: 3486 - protein, 12 aa, Artificial Sequence
  Non-cyclic GFR-binding peptide
PVKTSSLSMLFF

SEQ ID NO: 3487 - protein, 17 aa, Artificial Sequence
  Non-cyclic GFR-binding peptide
  MOD_RES (3)..(4): Xaa is C or S
PTXXVPTRLSSLSILFF

SEQ ID NO: 3488 - protein, 19 aa, Artificial Sequence
  Non-cyclic GFR-binding peptide
  MOD_RES (5)..(6): Xaa is C or S
IPKAXXVPTELSSLSMLFF

SEQ ID NO: 3489 - protein, 15 aa, Artificial Sequence
  Non-cyclic GFR-binding peptide
  MOD_RES (1)..(2): Xaa is C or S
XXAPTQLSSLSVLFF

SEQ ID NO: 3490 - protein, 19 aa, Artificial Sequence
  Non-cyclic GFR-binding peptide
  MOD_RES (5)..(6): Xaa is C or S
VPSTXXAPVKTSSLSMLFF

SEQ ID NO: 3491 - protein, 10 aa, Artificial Sequence
  Non-cyclic GFR-binding peptide
HHSSLSVLFF

SEQ ID NO: 3492 - protein, 17 aa, Artificial Sequence
  Non-cyclic GFR-binding peptide
  MOD_RES (3)..(4): Xaa is C or S
STXXAPVKTSSLSMLFF

SEQ ID NO: 3493 - protein, 11 aa, Artificial Sequence
  Non-cyclic GFR-binding peptide
TEESSLSMLFF

SEQ ID NO: 3494 - protein, 13 aa, Artificial Sequence
  Non-cyclic GFR-binding peptide
VPARLSSLSILFF

SEQ ID NO: 3495 - protein, 15 aa, Artificial Sequence
  Non-cyclic GFR-binding peptide
  MOD_RES (1)..(2): Xaa is C or S
XXVPTKLSSLSILFF

SEQ ID NO: 3496 - protein, 14 aa, Artificial Sequence
  Non-cyclic GFR-binding peptide
  MOD_RES (1)..(1): Xaa is C or S
XVPTRLSSLSILFF

SEQ ID NO: 3497 - protein, 20 aa, Artificial Sequence
  Non-cyclic GFR-binding peptide
  MOD_RES (6)..(7): Xaa is C or S
KASKAXXVPTKLSSLSILFF

SEQ ID NO: 3498 - protein, 10 aa, Artificial Sequence
  Non-cyclic GFR-binding peptide
ALSSLSILFF

SEQ ID NO: 3499 - protein, 12 aa, Artificial Sequence
  Non-cyclic GFR-binding peptide
PTKLSSLSVLFF

SEQ ID NO: 3500 - protein, 20 aa, Artificial Sequence
  Non-cyclic GFR-binding peptide
  MOD_RES (6)..(7): Xaa is C or S
HVPKPXXAPTKLSSLSVLFF

SEQ ID NO: 3501 - protein, 12 aa, Artificial Sequence
  Non-cyclic GFR-binding peptide
PTRLSSLSILFF

SEQ ID NO: 3502 - protein, 15 aa, Artificial Sequence
  Non-cyclic GFR-binding peptide
  MOD_RES (1)..(2): Xaa is C or S
XXAPTKLSSLSVLFF

SEQ ID NO: 3503 - protein, 14 aa, Artificial Sequence
  Non-cyclic GFR-binding peptide
  MOD_RES (1)..(1): Xaa is C or S
XVSQDLSSLSILFF

SEQ ID NO: 3504 - protein, 19 aa, Artificial Sequence
  Non-cyclic GFR-binding peptide
  MOD_RES (5)..(6): Xaa is C or S
APASXXVPARLSSLSILFF

SEQ ID NO: 3505 - protein, 13 aa, Artificial Sequence
  Non-cyclic GFR-binding peptide
VPTELSSLSMLFF

SEQ ID NO: 3506 - protein, 18 aa, Artificial Sequence
  Non-cyclic GFR-binding peptide
  MOD_RES (4)..(5): Xaa is C or S
PKPXXAPTKLSSLSVLFF

SEQ ID NO: 3507 - protein, 16 aa, Artificial Sequence
  Non-cyclic GFR-binding peptide
  MOD_RES (2)..(3): Xaa is C or S
AXXAPTKLSSLSVLFF

SEQ ID NO: 3508 - protein, 19 aa, Artificial Sequence
  Non-cyclic GFR-binding peptide
  MOD_RES (5)..(6): Xaa is C or S
SASPXXVSQDLSSLSILFF

SEQ ID NO: 3509 - protein, 9 aa, Artificial Sequence
  Non-cyclic GFR-binding peptide
LSSLSVLFF

SEQ ID NO: 3510 - protein, 14 aa, Artificial Sequence
  Non-cyclic GFR-binding peptide
  MOD_RES (1)..(1): Xaa is C or S
XVPARLSSLSILFF

SEQ ID NO: 3511 - protein, 10 aa, Artificial Sequence
  Non-cyclic GFR-binding peptide
DLSSLSILFF

SEQ ID NO: 3512 - protein, 17 aa, Artificial Sequence
  Non-cyclic GFR-binding peptide
  MOD_RES (3)..(4): Xaa is C or S
KAXXVPTKLSSLSVLFF

SEQ ID NO: 3513 - protein, 19 aa, Artificial Sequence
  Non-cyclic GFR-binding peptide
  MOD_RES (5)..(6): Xaa is C or S
VPKPXXAPTKLSSLSVLFF

SEQ ID NO: 3514 - protein, 19 aa, Artificial Sequence
  Non-cyclic GFR-binding peptide
  MOD_RES (6)..(6): Xaa is C or S
DEGLEXVPTEESSLSMLFF

SEQ ID NO: 3515 - protein, 14 aa, Artificial Sequence
  Non-cyclic GFR-binding peptide
  MOD_RES (1)..(1): Xaa is C or S
XAPTKLSSLSVLFF

SEQ ID NO: 3516 - protein, 11 aa, Artificial Sequence
  Non-cyclic GFR-binding peptide
TKLSSLSILFF

SEQ ID NO: 3517 - protein, 18 aa, Artificial Sequence
  Non-cyclic GFR-binding peptide
  MOD_RES (4)..(5): Xaa is C or S
GKAXXVPTKLSSLSVLFF

SEQ ID NO: 3518 - protein, 20 aa, Artificial Sequence
  Non-cyclic GFR-binding peptide
  MOD_RES (6)..(7): Xaa is C or S
ASASPXXVSQDLSSLSILFF

SEQ ID NO: 3519 - protein, 12 aa, Artificial Sequence
  Non-cyclic GFR-binding peptide
PTKMSSLSMLFF

SEQ ID NO: 3520 - protein, 19 aa, Artificial Sequence
  Non-cyclic GFR-binding peptide
  MOD_RES (4)..(4): Xaa is C or S
SVKXQPSRVHHSSLSVLFF

SEQ ID NO: 3521 - protein, 9 aa, Artificial Sequence
  Non-cyclic GFR-binding peptide
TSSLSMLFF

SEQ ID NO: 3522 - protein, 13 aa, Artificial Sequence
  Non-cyclic GFR-binding peptide
VPTEESSLSMLFF

SEQ ID NO: 3523 - protein, 19 aa, Artificial Sequence
  Non-cyclic GFR-binding peptide
  MOD_RES (5)..(6): Xaa is C or S
SAGPXXTPTKMSSLSMLFF

SEQ ID NO: 3524 - protein, 17 aa, Artificial Sequence
  Non-cyclic GFR-binding peptide
  MOD_RES (3)..(4): Xaa is C or S
KAXXVPTELSSLSMLFF

SEQ ID NO: 3525 - protein, 20 aa, Artificial Sequence
  Non-cyclic GFR-binding peptide
  MOD_RES (6)..(7): Xaa is C or S
ASASPXXVPQDLSSLSILFF

SEQ ID NO: 3526 - protein, 11 aa, Artificial Sequence
  Non-cyclic GFR-binding peptide
TKLSSLSVLFF

SEQ ID NO: 3527 - protein, 16 aa, Artificial Sequence
  Non-cyclic GFR-binding peptide
  MOD_RES (2)..(3): Xaa is C or S
PXXVPQALSSLSILFF

SEQ ID NO: 3528 - protein, 17 aa, Artificial Sequence
  Non-cyclic GFR-binding peptide
  MOD_RES (3)..(4): Xaa is C or S
KPXXAPTKLSSLSVLFF

SEQ ID NO: 3529 - protein, 10 aa, Artificial Sequence
  Non-cyclic GFR-binding peptide
QLSSLSVLFF

SEQ ID NO: 3530 - protein, 20 aa, Artificial Sequence
  Non-cyclic GFR-binding peptide
  MOD_RES (6)..(7): Xaa is C or S
AVPKAXXAPTKLSSLSVLFF

SEQ ID NO: 3531 - protein, 19 aa, Artificial Sequence
  Non-cyclic GFR-binding peptide
  MOD_RES (5)..(6): Xaa is C or S
TPPTXXVPTRLSSLSILFF

SEQ ID NO: 3532 - protein, 17 aa, Artificial Sequence
  Non-cyclic GFR-binding peptide
  MOD_RES (3)..(4): Xaa is C or S
KAXXVPTKLSSLSILFF

SEQ ID NO: 3533 - protein, 13 aa, Artificial Sequence
  Non-cyclic GFR-binding peptide
VPQDLSSLSILFF

SEQ ID NO: 3534 - protein, 10 aa, Artificial Sequence
  Non-cyclic GFR-binding peptide
EESSLSMLFF

SEQ ID NO: 3535 - protein, 19 aa, Artificial Sequence
  Non-cyclic GFR-binding peptide
  MOD_RES (5)..(6): Xaa is C or S
ASKAXXVPTKLSSLSILFF

SEQ ID NO: 3536 - protein, 15 aa, Artificial Sequence
  Non-cyclic GFR-binding peptide
  MOD_RES (2)..(2): Xaa is C or S
EXVPTEESSLSMLFF

SEQ ID NO: 3537 - protein, 20 aa, Artificial Sequence
  Non-cyclic GFR-binding peptide
  MOD_RES (6)..(7): Xaa is C or S
AAPASXXVPARLSSLSILFF

SEQ ID NO: 3538 - protein, 9 aa, Artificial Sequence
  Non-cyclic GFR-binding peptide
MSSLSMLFF

SEQ ID NO: 3539 - protein, 20 aa, Artificial Sequence
  Non-cyclic GFR-binding peptide
  MOD_RES (7)..(7): Xaa is C or S
HVTKPTXAPTKLSSLSVLFF

SEQ ID NO: 3540 - protein, 11 aa, Artificial Sequence
  Non-cyclic GFR-binding peptide
TRLSSLSILFF

SEQ ID NO: 3541 - protein, 9 aa, Artificial Sequence
  Non-cyclic GFR-binding peptide
HSSLSVLFF

SEQ ID NO: 3542 - protein, 17 aa, Artificial Sequence
  Non-cyclic GFR-binding peptide
  MOD_RES (3)..(4): Xaa is C or S
SPXXVPQDLSSLSILFF

SEQ ID NO: 3543 - protein, 14 aa, Artificial Sequence
  Non-cyclic GFR-binding peptide
  MOD_RES (1)..(1): Xaa is C or S
XAPVKTSSLSMLFF

SEQ ID NO: 3544 - protein, 11 aa, Artificial Sequence
  Non-cyclic GFR-binding peptide
VHHSSLSVLFF

SEQ ID NO: 3545 - protein, 11 aa, Artificial Sequence
  Non-cyclic GFR-binding peptide
MIQITINSLDQ

SEQ ID NO: 3546 - protein, 15 aa, Artificial Sequence
  Non-cyclic GFR-binding peptide
  MOD_RES (14)..(15): Xaa is C or S
VKAIKVSRLDQSVXX

SEQ ID NO: 3547 - protein, 10 aa, Artificial Sequence
  Non-cyclic GFR-binding peptide
MIQVTINSLK

SEQ ID NO: 3548 - protein, 15 aa, Artificial Sequence
  Non-cyclic GFR-binding peptide
  MOD_RES (14)..(14): Xaa is C or S
VKAVKVSRLKTPAXT

SEQ ID NO: 3549 - protein, 20 aa, Artificial Sequence
  Non-cyclic GFR-binding peptide
  MOD_RES (14)..(15): Xaa is C or S
VKAVKVSRLKTPAXXPKPVY

SEQ ID NO: 3550 - protein, 12 aa, Artificial Sequence
  Non-cyclic GFR-binding peptide
VKAMKVSRLETP

SEQ ID NO: 3551 - protein, 9 aa, Artificial Sequence
  Non-cyclic GFR-binding peptide
VKAMKVSRL

SEQ ID NO: 3552 - protein, 19 aa, Artificial Sequence
  Non-cyclic GFR-binding peptide
  MOD_RES (14)..(14): Xaa is C or S
IKRVQVPRLKTPAXTPKTV

SEQ ID NO: 3553 - protein, 20 aa, Artificial Sequence
  Non-cyclic GFR-binding peptide
  MOD_RES (14)..(15): Xaa is C or S
MIQITINSLAQPVXXPAASA

SEQ ID NO: 3554 - protein, 19 aa, Artificial Sequence
  Non-cyclic GFR-binding peptide
  MOD_RES (14)..(15): Xaa is C or S
VKAVKVSRLQTPAXXPKPV

SEQ ID NO: 3555 - protein, 11 aa, Artificial Sequence
  Non-cyclic GFR-binding peptide
MIQMTINSLET

SEQ ID NO: 3556 - protein, 16 aa, Artificial Sequence
  Non-cyclic GFR-binding peptide
  MOD_RES (14)..(15): Xaa is C or S
VKAIKVSRLDQSVXXP

SEQ ID NO: 3557 - protein, 9 aa, Artificial Sequence
  Non-cyclic GFR-binding peptide
IKRIQVPRL

SEQ ID NO: 3558 - protein, 20 aa, Artificial Sequence
  Non-cyclic GFR-binding peptide
  MOD_RES (14)..(14): Xaa is C or S
VKAVKVSRLKTPAXTPKTVH

SEQ ID NO: 3559 - protein, 12 aa, Artificial Sequence
  Non-cyclic GFR-binding peptide
VKAVKVSRLKTP

SEQ ID NO: 3560 - protein, 13 aa, Artificial Sequence
  Non-cyclic GFR-binding peptide
VKAVKVSRLKTPA

SEQ ID NO: 3561 - protein, 11 aa, Artificial Sequence
  Non-cyclic GFR-binding peptide
YYLVTLPELQV

SEQ ID NO: 3562 - protein, 17 aa, Artificial Sequence
  Non-cyclic GFR-binding peptide
  MOD_RES (14)..(15): Xaa is C or S
IKRIQVPRLAQPVXXPA

SEQ ID NO: 3563 - protein, 15 aa, Artificial Sequence
  Non-cyclic GFR-binding peptide
YYLVTLPELQVQTPR

SEQ ID NO: 3564 - protein, 18 aa, Artificial Sequence
  Non-cyclic GFR-binding peptide
  MOD_RES (14)..(15): Xaa is C or S
MIQVTINSLQTPAXXPKP

SEQ ID NO: 3565 - protein, 14 aa, Artificial Sequence
  Non-cyclic GFR-binding peptide
  MOD_RES (14)..(14): Xaa is C or S
MIQMTINSLETPVX

SEQ ID NO: 3566 - protein, 13 aa, Artificial Sequence
  Non-cyclic GFR-binding peptide
VKAIKVSRLDQSV

SEQ ID NO: 3567 - protein, 14 aa, Artificial Sequence
  Non-cyclic GFR-binding peptide
  MOD_RES (14)..(14): Xaa is C or S
MIQITINSLDQPVX

SEQ ID NO: 3568 - protein, 18 aa, Artificial Sequence
  Non-cyclic GFR-binding peptide
  MOD_RES (14)..(14): Xaa is C or S
IKRVQVPRLKTPAXTPKT

SEQ ID NO: 3569 - protein, 14 aa, Artificial Sequence
  Non-cyclic GFR-binding peptide
  MOD_RES (14)..(14): Xaa is C or S
YYLMTLPEEETPVX

SEQ ID NO: 3570 - protein, 14 aa, Artificial Sequence
  Non-cyclic GFR-binding peptide
  MOD_RES (14)..(14): Xaa is C or S
IKRMQVPRLETPVX

SEQ ID NO: 3571 - protein, 17 aa, Artificial Sequence
  Non-cyclic GFR-binding peptide
  MOD_RES (14)..(15): Xaa is C or S
IKRVQVPRLQTPAXXPK

SEQ ID NO: 3572 - protein, 17 aa, Artificial Sequence
  Non-cyclic GFR-binding peptide
  MOD_RES (14)..(15): Xaa is C or S
IKRVQVPRLKTPAXXPK

SEQ ID NO: 3573 - protein, 17 aa, Artificial Sequence
  Non-cyclic GFR-binding peptide
  MOD_RES (16)..(16): Xaa is C or S
YYVVPLPEHHVRSPQXK

SEQ ID NO: 3574 - protein, 20 aa, Artificial Sequence
  Non-cyclic GFR-binding peptide
  MOD_RES (14)..(15): Xaa is C or S
IKRIQVPRLDQPVXXPSASA

SEQ ID NO: 3575 - protein, 11 aa, Artificial Sequence
  Non-cyclic GFR-binding peptide
IKRVQVPRLQT

SEQ ID NO: 3576 - protein, 17 aa, Artificial Sequence
  Non-cyclic GFR-binding peptide
  MOD_RES (14)..(15): Xaa is C or S
MIQITINSLAQPVXXPA

SEQ ID NO: 3577 - protein, 16 aa, Artificial Sequence
  Non-cyclic GFR-binding peptide
  MOD_RES (14)..(15): Xaa is C or S
VKAIKVSRLAQPVXXP

SEQ ID NO: 3578 - protein, 18 aa, Artificial Sequence
  Non-cyclic GFR-binding peptide
  MOD_RES (14)..(15): Xaa is C or S
MIQMTINSLETPVXXAKP

SEQ ID NO: 3579 - protein, 17 aa, Artificial Sequence
  Non-cyclic GFR-binding peptide
  MOD_RES (14)..(15): Xaa is C or S
MIQMTINSLETPVXXAK

SEQ ID NO: 3580 - protein, 12 aa, Artificial Sequence
  Non-cyclic GFR-binding peptide
MIQVTINSLQTP

SEQ ID NO: 3581 - protein, 17 aa, Artificial Sequence
  Non-cyclic GFR-binding peptide
  MOD_RES (14)..(15): Xaa is C or S
VKAIKVSRLDQSVXXPS

SEQ ID NO: 3582 - protein, 13 aa, Artificial Sequence
  Non-cyclic GFR-binding peptide
IKRMQVPRLETPV

SEQ ID NO: 3583 - protein, 20 aa, Artificial Sequence
  Non-cyclic GFR-binding peptide
  MOD_RES (14)..(15): Xaa is C or S
IKRIQVPRLAQPVXXPAASA

SEQ ID NO: 3584 - protein, 15 aa, Artificial Sequence
  Non-cyclic GFR-binding peptide
  MOD_RES (14)..(15): Xaa is C or S
VKAVKVSRLKTPAXX

SEQ ID NO: 3585 - protein, 10 aa, Artificial Sequence
  Non-cyclic GFR-binding peptide
MIQMTINSLE

SEQ ID NO: 3586 - protein, 19 aa, Artificial Sequence
  Non-cyclic GFR-binding peptide
  MOD_RES (14)..(15): Xaa is C or S
VKAIKVSRLDQSVXXPSAS

SEQ ID NO: 3587 - protein, 14 aa, Artificial Sequence
  Non-cyclic GFR-binding peptide
  MOD_RES (14)..(14): Xaa is C or S
YYVMPLPEEETPVX

SEQ ID NO: 3588 - protein, 19 aa, Artificial Sequence
  Non-cyclic GFR-binding peptide
  MOD_RES (14)..(15): Xaa is C or S
VKAMKVSRLETPVXXAKPI

SEQ ID NO: 3589 - protein, 20 aa, Artificial Sequence
  Non-cyclic GFR-binding peptide
  MOD_RES (14)..(14): Xaa is C or S
YYLMTLPEEETPVXELGEDN

SEQ ID NO: 3590 - protein, 14 aa, Artificial Sequence
  Non-cyclic GFR-binding peptide
  MOD_RES (14)..(14): Xaa is C or S
VKAIKVSRLAQPVX

SEQ ID NO: 3591 - protein, 15 aa, Artificial Sequence
  Non-cyclic GFR-binding peptide
  MOD_RES (14)..(15): Xaa is C or S
IKRMQVPRLETPVXX

SEQ ID NO: 3592 - protein, 14 aa, Artificial Sequence
  Non-cyclic GFR-binding peptide
  MOD_RES (14)..(14): Xaa is C or S
IKRIQVPRLDQSVX

SEQ ID NO: 3593 - protein, 15 aa, Artificial Sequence
  Non-cyclic GFR-binding peptide
  MOD_RES (14)..(14): Xaa is C or S
YYLMTLPEEETPVXE

SEQ ID NO: 3594 - protein, 16 aa, Artificial Sequence
  Non-cyclic GFR-binding peptide
  MOD_RES (14)..(15): Xaa is C or S
VKAMKVSRLETPVXXA

SEQ ID NO: 3595 - protein, 14 aa, Artificial Sequence
  Non-cyclic GFR-binding peptide
  MOD_RES (14)..(14): Xaa is C or S
MIQVTINSLKTPAX

SEQ ID NO: 3596 - protein, 13 aa, Artificial Sequence
  Non-cyclic GFR-binding peptide
VKAVKVSRLQTPA

SEQ ID NO: 3597 - protein, 15 aa, Artificial Sequence
  Non-cyclic GFR-binding peptide
  MOD_RES (14)..(15): Xaa is C or S
VKAVKVSRLQTPAXX

SEQ ID NO: 3598 - protein, 16 aa, Artificial Sequence
  Non-cyclic GFR-binding peptide
  MOD_RES (16)..(16): Xaa is C or S
YYVVPLPELQVQTPRX

SEQ ID NO: 3599 - protein, 17 aa, Artificial Sequence
  Non-cyclic GFR-binding peptide
  MOD_RES (14)..(15): Xaa is C or S
MIQITINSLDQPVXXPS

SEQ ID NO: 3600 - protein, 10 aa, Artificial Sequence
  Non-cyclic GFR-binding peptide
IKRIQVPRLD

SEQ ID NO: 3601 - protein, 12 aa, Artificial Sequence
  Non-cyclic GFR-binding peptide
YYLVTLPELQVQ

SEQ ID NO: 3602 - protein, 11 aa, Artificial Sequence
  Non-cyclic GFR-binding peptide
MIQVTINSLKT

SEQ ID NO: 3603 - protein, 13 aa, Artificial Sequence
  Non-cyclic GFR-binding peptide
IKRIQVPRLDQPV

SEQ ID NO: 3604 - protein, 12 aa, Artificial Sequence
  Non-cyclic GFR-binding peptide
VKAIKVSRLDQP

SEQ ID NO: 3605 - protein, 15 aa, Artificial Sequence
  Non-cyclic GFR-binding peptide
  MOD_RES (14)..(15): Xaa is C or S
IKRIQVPRLDQPVXX

SEQ ID NO: 3606 - protein, 15 aa, Artificial Sequence
  Non-cyclic GFR-binding peptide
  MOD_RES (14)..(15): Xaa is C or S
MIQMTINSLETPVXX

SEQ ID NO: 3607 - protein, 20 aa, Artificial Sequence
  Non-cyclic GFR-binding peptide
  MOD_RES (14)..(15): Xaa is C or S
VKAMKVSRLETPVXXAKPIK

SEQ ID NO: 3608 - protein, 13 aa, Artificial Sequence
  Non-cyclic GFR-binding peptide
YYLMTLPEEETPV

SEQ ID NO: 3609 - protein, 12 aa, Artificial Sequence
  Non-cyclic GFR-binding peptide
VKAIKVSRLDQS

SEQ ID NO: 3610 - protein, 16 aa, Artificial Sequence
  Non-cyclic GFR-binding peptide
  MOD_RES (14)..(15): Xaa is C or S
VKAIKVSRLDQPVXXP

SEQ ID NO: 3611 - protein, 19 aa, Artificial Sequence
  Non-cyclic GFR-binding peptide
  MOD_RES (14)..(14): Xaa is C or S
YYLMTLPEEETPVXELGED

SEQ ID NO: 3612 - protein, 17 aa, Artificial Sequence
  Non-cyclic GFR-binding peptide
  MOD_RES (14)..(15): Xaa is C or S
VKAVKVSRLQTPAXXPK

SEQ ID NO: 3613 - protein, 14 aa, Artificial Sequence
  Non-cyclic GFR-binding peptide
YYVVPLPELQVQTP

SEQ ID NO: 3614 - protein, 15 aa, Artificial Sequence
  Non-cyclic GFR-binding peptide
  MOD_RES (14)..(15): Xaa is C or S
VKAIKVSRLDQPVXX

SEQ ID NO: 3615 - protein, 19 aa, Artificial Sequence
  Non-cyclic GFR-binding peptide
  MOD_RES (14)..(15): Xaa is C or S
IKRMQVPRLETPVXXAKPI

SEQ ID NO: 3616 - protein, 18 aa, Artificial Sequence
  Non-cyclic GFR-binding peptide
  MOD_RES (16)..(16): Xaa is C or S
YYVVPLPEHHVRSPQXKV

SEQ ID NO: 3617 - protein, 16 aa, Artificial Sequence
  Non-cyclic GFR-binding peptide
  MOD_RES (16)..(16): Xaa is C or S
YYVVPLPEHHVRSPQX

SEQ ID NO: 3618 - protein, 19 aa, Artificial Sequence
  Non-cyclic GFR-binding peptide
  MOD_RES (14)..(15): Xaa is C or S
MIQITINSLDQSVXXPSAS

SEQ ID NO: 3619 - protein, 12 aa, Artificial Sequence
  Non-cyclic GFR-binding peptide
YYLVTLPEHHVR

SEQ ID NO: 3620 - protein, 17 aa, Artificial Sequence
  Non-cyclic GFR-binding peptide
  MOD_RES (14)..(15): Xaa is C or S
IKRIQVPRLDQSVXXPS

SEQ ID NO: 3621 - protein, 18 aa, Artificial Sequence
  Non-cyclic GFR-binding peptide
  MOD_RES (14)..(14): Xaa is C or S
VKAVKVSRLKTPAXTPKT

SEQ ID NO: 3622 - protein, 10 aa, Artificial Sequence
  Non-cyclic GFR-binding peptide
IKRVQVPRLK

SEQ ID NO: 3623 - protein, 19 aa, Artificial Sequence
  Non-cyclic GFR-binding peptide
  MOD_RES (14)..(15): Xaa is C or S
IKRIQVPRLDQPVXXPSAS

SEQ ID NO: 3624 - protein, 11 aa, Artificial Sequence
  Non-cyclic GFR-binding peptide
YYVVPLPEHHV

SEQ ID NO: 3625 - protein, 16 aa, Artificial Sequence
  Non-cyclic GFR-binding peptide
  MOD_RES (14)..(14): Xaa is C or S
VKAVKVSRLKTPAXTP

SEQ ID NO: 3626 - protein, 11 aa, Artificial Sequence
  Non-cyclic GFR-binding peptide
IKRIQVPRLDQ

SEQ ID NO: 3627 - protein, 11 aa, Artificial Sequence
  Non-cyclic GFR-binding peptide
YYVMPLPEEET

SEQ ID NO: 3628 - protein, 10 aa, Artificial Sequence
  Non-cyclic GFR-binding peptide
YYLVTLPEHH

SEQ ID NO: 3629 - protein, 11 aa, Artificial Sequence
  Non-cyclic GFR-binding peptide
MIQVTINSLQT

SEQ ID NO: 3630 - protein, 17 aa, Artificial Sequence
  Non-cyclic GFR-binding peptide
  MOD_RES (14)..(14): Xaa is C or S
YYLMTLPEEETPVXELG

SEQ ID NO: 3631 - protein, 18 aa, Artificial Sequence
  Non-cyclic GFR-binding peptide
  MOD_RES (14)..(14): Xaa is C or S
YYLMTLPEEETPVXELGE

SEQ ID NO: 3632 - protein, 18 aa, Artificial Sequence
  Non-cyclic GFR-binding peptide
  MOD_RES (14)..(15): Xaa is C or S
VKAVKVSRLKTPAXXPKP

SEQ ID NO: 3633 - protein, 15 aa, Artificial Sequence
  Non-cyclic GFR-binding peptide
YYLVTLPEHHVRSPQ

SEQ ID NO: 3634 - protein, 16 aa, Artificial Sequence
  Non-cyclic GFR-binding peptide
  MOD_RES (14)..(15): Xaa is C or S
IKRVQVPRLKTPAXXP

SEQ ID NO: 3635 - protein, 13 aa, Artificial Sequence
  Non-cyclic GFR-binding peptide
VKAIKVSRLDQPV

SEQ ID NO: 3636 - protein, 10 aa, Artificial Sequence
  Non-cyclic GFR-binding peptide
VKAIKVSRLD

SEQ ID NO: 3637 - protein, 11 aa, Artificial Sequence
  Non-cyclic GFR-binding peptide
VKAIKVSRLAQ

SEQ ID NO: 3638 - protein, 20 aa, Artificial Sequence
  Non-cyclic GFR-binding peptide
  MOD_RES (14)..(15): Xaa is C or S
MIQVTINSLQTPAXXPKPVT

SEQ ID NO: 3639 - protein, 12 aa, Artificial Sequence
  Non-cyclic GFR-binding peptide
IKRMQVPRLETP

SEQ ID NO: 3640 - protein, 20 aa, Artificial Sequence
  Non-cyclic GFR-binding peptide
  MOD_RES (14)..(14): Xaa is C or S
YYVMPLPEEETPVXELGEDN

SEQ ID NO: 3641 - protein, 16 aa, Artificial Sequence
  Non-cyclic GFR-binding peptide
  MOD_RES (14)..(15): Xaa is C or S
VKAVKVSRLKTPAXXP

SEQ ID NO: 3642 - protein, 18 aa, Artificial Sequence
  Non-cyclic GFR-binding peptide
  MOD_RES (14)..(14): Xaa is C or S
YYVMPLPEEETPVXELGE

SEQ ID NO: 3643 - protein, 17 aa, Artificial Sequence
  Non-cyclic GFR-binding peptide
  MOD_RES (14)..(15): Xaa is C or S
MIQITINSLDQSVXXPS

SEQ ID NO: 3644 - protein, 12 aa, Artificial Sequence
  Non-cyclic GFR-binding peptide
YYVVPLPEHHVR

SEQ ID NO: 3645 - protein, 16 aa, Artificial Sequence
  Non-cyclic GFR-binding peptide
  MOD_RES (14)..(14): Xaa is C or S
IKRVQVPRLKTPAXTP

SEQ ID NO: 3646 - protein, 14 aa, Artificial Sequence
  Non-cyclic GFR-binding peptide
YYLVTLPEHHVRSP

SEQ ID NO: 3647 - protein, 15 aa, Artificial Sequence
  Non-cyclic GFR-binding peptide
YYVVPLPEHHVRSPQ

SEQ ID NO: 3648 - protein, 16 aa, Artificial Sequence
  Non-cyclic GFR-binding peptide
  MOD_RES (14)..(15): Xaa is C or S
VKAVKVSRLQTPAXXP

SEQ ID NO: 3649 - protein, 15 aa, Artificial Sequence
  Non-cyclic GFR-binding peptide
  MOD_RES (14)..(15): Xaa is C or S
VKAIKVSRLAQPVXX

SEQ ID NO: 3650 - protein, 13 aa, Artificial Sequence
  Non-cyclic GFR-binding peptide
MIQMTINSLETPV

SEQ ID NO: 3651 - protein, 10 aa, Artificial Sequence
  Non-cyclic GFR-binding peptide
VKAIKVSRLA

SEQ ID NO: 3652 - protein, 15 aa, Artificial Sequence
  Non-cyclic GFR-binding peptide
  MOD_RES (14)..(15): Xaa is C or S
IKRIQVPRLDQSVXX

SEQ ID NO: 3653 - protein, 18 aa, Artificial Sequence
  Non-cyclic GFR-binding peptide
  MOD_RES (16)..(16): Xaa is C or S
YYLVTLPEHHVRSPQXKV

SEQ ID NO: 3654 - protein, 12 aa, Artificial Sequence
  Non-cyclic GFR-binding peptide
MIQVTINSLKTP

SEQ ID NO: 3655 - protein, 20 aa, Artificial Sequence
  Non-cyclic GFR-binding peptide
  MOD_RES (16)..(16): Xaa is C or S
YYVVPLPEHHVRSPQXKVSS

SEQ ID NO: 3656 - protein, 20 aa, Artificial Sequence
  Non-cyclic GFR-binding peptide
  MOD_RES (14)..(15): Xaa is C or S
IKRVQVPRLKTPAXXPKPVY

SEQ ID NO: 3657 - protein, 16 aa, Artificial Sequence
  Non-cyclic GFR-binding peptide
  MOD_RES (14)..(15): Xaa is C or S
IKRIQVPRLDQPVXXP

SEQ ID NO: 3658 - protein, 12 aa, Artificial Sequence
  Non-cyclic GFR-binding peptide
YYVVPLPELQVQ

SEQ ID NO: 3659 - protein, 11 aa, Artificial Sequence
  Non-cyclic GFR-binding peptide
YYLMTLPEEET

SEQ ID NO: 3660 - protein, 12 aa, Artificial Sequence
  Non-cyclic GFR-binding peptide
IKRVQVPRLQTP

SEQ ID NO: 3661 - protein, 11 aa, Artificial Sequence
  Non-cyclic GFR-binding peptide
IKRIQVPRLAQ

SEQ ID NO: 3662 - protein, 14 aa, Artificial Sequence
  Non-cyclic GFR-binding peptide
  MOD_RES (14)..(14): Xaa is C or S
VKAIKVSRLDQSVX

SEQ ID NO: 3663 - protein, 20 aa, Artificial Sequence
  Non-cyclic GFR-binding peptide
  MOD_RES (14)..(15): Xaa is C or S
MIQITINSLDQPVXXPSASA

SEQ ID NO: 3664 - protein, 19 aa, Artificial Sequence
  Non-cyclic GFR-binding peptide
  MOD_RES (14)..(15): Xaa is C or S
MIQITINSLAQPVXXPAAS

SEQ ID NO: 3665 - protein, 13 aa, Artificial Sequence
  Non-cyclic GFR-binding peptide
IKRIQVPRLDQSV

SEQ ID NO: 3666 - protein, 17 aa, Artificial Sequence
  Non-cyclic GFR-binding peptide
  MOD_RES (14)..(15): Xaa is C or S
IKRIQVPRLDQPVXXPS

SEQ ID NO: 3667 - protein, 19 aa, Artificial Sequence
  Non-cyclic GFR-binding peptide
  MOD_RES (14)..(14): Xaa is C or S
YYVMPLPEEETPVXELGED

SEQ ID NO: 3668 - protein, 18 aa, Artificial Sequence
  Non-cyclic GFR-binding peptide
  MOD_RES (14)..(15): Xaa is C or S
VKAIKVSRLAQPVXXPAA

SEQ ID NO: 3669 - protein, 13 aa, Artificial Sequence
  Non-cyclic GFR-binding peptide
YYVMPLPEEETPV

SEQ ID NO: 3670 - protein, 13 aa, Artificial Sequence
  Non-cyclic GFR-binding peptide
VKAIKVSRLAQPV

SEQ ID NO: 3671 - protein, 13 aa, Artificial Sequence
  Non-cyclic GFR-binding peptide
YYVVPLPEHHVRS

SEQ ID NO: 3672 - protein, 10 aa, Artificial Sequence
  Non-cyclic GFR-binding peptide
IKRMQVPRLE

SEQ ID NO: 3673 - protein, 16 aa, Artificial Sequence
  Non-cyclic GFR-binding peptide
  MOD_RES (16)..(16): Xaa is C or S
YYLVTLPEHHVRSPQX

SEQ ID NO: 3674 - protein, 9 aa, Artificial Sequence
  Non-cyclic GFR-binding peptide
YYVMPLPEE

SEQ ID NO: 3675 - protein, 19 aa, Artificial Sequence
  Non-cyclic GFR-binding peptide
  MOD_RES (14)..(15): Xaa is C or S
VKAIKVSRLDQPVXXPSAS

SEQ ID NO: 3676 - protein, 17 aa, Artificial Sequence
  Non-cyclic GFR-binding peptide
  MOD_RES (14)..(14): Xaa is C or S
YYVMPLPEEETPVXELG

SEQ ID NO: 3677 - protein, 10 aa, Artificial Sequence
  Non-cyclic GFR-binding peptide
IKRIQVPRLA

SEQ ID NO: 3678 - protein, 16 aa, Artificial Sequence
  Non-cyclic GFR-binding peptide
  MOD_RES (14)..(15): Xaa is C or S
IKRIQVPRLAQPVXXP

SEQ ID NO: 3679 - protein, 20 aa, Artificial Sequence
  Non-cyclic GFR-binding peptide
  MOD_RES (14)..(15): Xaa is C or S
MIQMTINSLETPVXXAKPIS

SEQ ID NO: 3680 - protein, 12 aa, Artificial Sequence
  Non-cyclic GFR-binding peptide
MIQMTINSLETP

SEQ ID NO: 3681 - protein, 20 aa, Artificial Sequence
  Non-cyclic GFR-binding peptide
  MOD_RES (14)..(15): Xaa is C or S
VKAIKVSRLDQPVXXPSASA

SEQ ID NO: 3682 - protein, 17 aa, Artificial Sequence
  Non-cyclic GFR-binding peptide
  MOD_RES (14)..(15): Xaa is C or S
VKAVKVSRLKTPAXXPK

SEQ ID NO: 3683 - protein, 19 aa, Artificial Sequence
  Non-cyclic GFR-binding peptide
  MOD_RES (14)..(15): Xaa is C or S
IKRIQVPRLDQSVXXPSAS

SEQ ID NO: 3684 - protein, 9 aa, Artificial Sequence
  Non-cyclic GFR-binding peptide
MIQMTINSL

SEQ ID NO: 3685 - protein, 15 aa, Artificial Sequence
  Non-cyclic GFR-binding peptide
  MOD_RES (14)..(14): Xaa is C or S
MIQVTINSLKTPAXT

SEQ ID NO: 3686 - protein, 20 aa, Artificial Sequence
  Non-cyclic GFR-binding peptide
  MOD_RES (14)..(15): Xaa is C or S
VKAIKVSRLAQPVXXPAASA

SEQ ID NO: 3687 - protein, 13 aa, Artificial Sequence
  Non-cyclic GFR-binding peptide
IKRVQVPRLQTPA

SEQ ID NO: 3688 - protein, 13 aa, Artificial Sequence
  Non-cyclic GFR-binding peptide
MIQVTINSLKTPA

SEQ ID NO: 3689 - protein, 15 aa, Artificial Sequence
  Non-cyclic GFR-binding peptide
  MOD_RES (14)..(15): Xaa is C or S
IKRIQVPRLAQPVXX

SEQ ID NO: 3690 - protein, 14 aa, Artificial Sequence
  Non-cyclic GFR-binding peptide
  MOD_RES (14)..(14): Xaa is C or S
VKAMKVSRLETPVX

SEQ ID NO: 3691 - protein, 11 aa, Artificial Sequence
  Non-cyclic GFR-binding peptide
VKAIKVSRLDQ

SEQ ID NO: 3692 - protein, 14 aa, Artificial Sequence
  Non-cyclic GFR-binding peptide
  MOD_RES (14)..(14): Xaa is C or S
MIQITINSLAQPVX

SEQ ID NO: 3693 - protein, 20 aa, Artificial Sequence
  Non-cyclic GFR-binding peptide
  MOD_RES (14)..(15): Xaa is C or S
MIQVTINSLKTPAXXPKPVY

SEQ ID NO: 3694 - protein, 18 aa, Artificial Sequence
  Non-cyclic GFR-binding peptide
  MOD_RES (14)..(15): Xaa is C or S
IKRIQVPRLDQPVXXPSA

SEQ ID NO: 3695 - protein, 17 aa, Artificial Sequence
  Non-cyclic GFR-binding peptide
  MOD_RES (16)..(16): Xaa is C or S
YYLVTLPELQVQTPRXQ

SEQ ID NO: 3696 - protein, 18 aa, Artificial Sequence
  Non-cyclic GFR-binding peptide
  MOD_RES (16)..(16): Xaa is C or S
YYLVTLPELQVQTPRXQV

SEQ ID NO: 3697 - protein, 16 aa, Artificial Sequence
  Non-cyclic GFR-binding peptide
  MOD_RES (14)..(15): Xaa is C or S
MIQITINSLDQSVXXP

SEQ ID NO: 3698 - protein, 11 aa, Artificial Sequence
  Non-cyclic GFR-binding peptide
VKAMKVSRLET

SEQ ID NO: 3699 - protein, 20 aa, Artificial Sequence
  Non-cyclic GFR-binding peptide
  MOD_RES (16)..(16): Xaa is C or S
YYLVTLPELQVQTPRXQVNR

SEQ ID NO: 3700 - protein, 18 aa, Artificial Sequence
  Non-cyclic GFR-binding peptide
  MOD_RES (14)..(15): Xaa is C or S
IKRIQVPRLAQPVXXPAA

SEQ ID NO: 3701 - protein, 14 aa, Artificial Sequence
  Non-cyclic GFR-binding peptide
  MOD_RES (14)..(14): Xaa is C or S
MIQVTINSLQTPAX

SEQ ID NO: 3702 - protein, 19 aa, Artificial Sequence
  Non-cyclic GFR-binding peptide
  MOD_RES (14)..(15): Xaa is C or S
MIQITINSLDQPVXXPSAS

SEQ ID NO: 3703 - protein, 17 aa, Artificial Sequence
  Non-cyclic GFR-binding peptide
  MOD_RES (14)..(15): Xaa is C or S
VKAIKVSRLAQPVXXPA

SEQ ID NO: 3704 - protein, 13 aa, Artificial Sequence
  Non-cyclic GFR-binding peptide
YYLVTLPEHHVRS

SEQ ID NO: 3705 - protein, 16 aa, Artificial Sequence
  Non-cyclic GFR-binding peptide
  MOD_RES (14)..(15): Xaa is C or S
MIQMTINSLETPVXXA

SEQ ID NO: 3706 - protein, 19 aa, Artificial Sequence
  Non-cyclic GFR-binding peptide
  MOD_RES (14)..(15): Xaa is C or S
MIQVTINSLQTPAXXPKPV

SEQ ID NO: 3707 - protein, 17 aa, Artificial Sequence
  Non-cyclic GFR-binding peptide
  MOD_RES (14)..(15): Xaa is C or S
VKAIKVSRLDQPVXXPS

SEQ ID NO: 3708 - protein, 11 aa, Artificial Sequence
  Non-cyclic GFR-binding peptide
VKAVKVSRLKT

SEQ ID NO: 3709 - protein, 17 aa, Artificial Sequence
  Non-cyclic GFR-binding peptide
  MOD_RES (14)..(15): Xaa is C or S
VKAMKVSRLETPVXXAK

SEQ ID NO: 3710 - protein, 20 aa, Artificial Sequence
  Non-cyclic GFR-binding peptide
  MOD_RES (14)..(15): Xaa is C or S
IKRVQVPRLQTPAXXPKPVT

SEQ ID NO: 3711 - protein, 12 aa, Artificial Sequence
  Non-cyclic GFR-binding peptide
YYLMTLPEEETP

SEQ ID NO: 3712 - protein, 12 aa, Artificial Sequence
  Non-cyclic GFR-binding peptide
MIQITINSLDQP

SEQ ID NO: 3713 - protein, 16 aa, Artificial Sequence
  Non-cyclic GFR-binding peptide
  MOD_RES (14)..(15): Xaa is C or S
MIQVTINSLKTPAXXP

SEQ ID NO: 3714 - protein, 19 aa, Artificial Sequence
  Non-cyclic GFR-binding peptide
  MOD_RES (14)..(15): Xaa is C or S
IKRVQVPRLQTPAXXPKPV

SEQ ID NO: 3715 - protein, 20 aa, Artificial Sequence
  Non-cyclic GFR-binding peptide
  MOD_RES (16)..(16): Xaa is C or S
YYLVTLPEHHVRSPQXKVSS

SEQ ID NO: 3716 - protein, 11 aa, Artificial Sequence
  Non-cyclic GFR-binding peptide
MIQITINSLAQ

SEQ ID NO: 3717 - protein, 15 aa, Artificial Sequence
  Non-cyclic GFR-binding peptide
  MOD_RES (14)..(15): Xaa is C or S
MIQVTINSLQTPAXX

SEQ ID NO: 3718 - protein, 16 aa, Artificial Sequence
  Non-cyclic GFR-binding peptide
  MOD_RES (14)..(15): Xaa is C or S
IKRIQVPRLDQSVXXP

SEQ ID NO: 3719 - protein, 12 aa, Artificial Sequence
  Non-cyclic GFR-binding peptide
VKAIKVSRLAQP

SEQ ID NO: 3720 - protein, 18 aa, Artificial Sequence
  Non-cyclic GFR-binding peptide
  MOD_RES (14)..(15): Xaa is C or S
MIQITINSLAQPVXXPAA

SEQ ID NO: 3721 - protein, 19 aa, Artificial Sequence
  Non-cyclic GFR-binding peptide
  MOD_RES (14)..(14): Xaa is C or S
VKAVKVSRLKTPAXTPKTV

SEQ ID NO: 3722 - protein, 13 aa, Artificial Sequence
  Non-cyclic GFR-binding peptide
MIQITINSLDQSV

SEQ ID NO: 3723 - protein, 18 aa, Artificial Sequence
  Non-cyclic GFR-binding peptide
  MOD_RES (16)..(16): Xaa is C or S
YYVVPLPELQVQTPRXQV

SEQ ID NO: 3724 - protein, 18 aa, Artificial Sequence
  Non-cyclic GFR-binding peptide
  MOD_RES (14)..(15): Xaa is C or S
VKAIKVSRLDQSVXXPSA

SEQ ID NO: 3725 - protein, 12 aa, Artificial Sequence
  Non-cyclic GFR-binding peptide
IKRIQVPRLDQS

SEQ ID NO: 3726 - protein, 19 aa, Artificial Sequence
  Non-cyclic GFR-binding peptide
  MOD_RES (16)..(16): Xaa is C or S
YYVVPLPEHHVRSPQXKVS

SEQ ID NO: 3727 - protein, 9 aa, Artificial Sequence
  Non-cyclic GFR-binding peptide
VKAIKVSRL

SEQ ID NO: 3728 - protein, 12 aa, Artificial Sequence
  Non-cyclic GFR-binding peptide
IKRVQVPRLKTP

SEQ ID NO: 3729 - protein, 14 aa, Artificial Sequence
  Non-cyclic GFR-binding peptide
  MOD_RES (14)..(14): Xaa is C or S
VKAVKVSRLKTPAX

SEQ ID NO: 3730 - protein, 18 aa, Artificial Sequence
  Non-cyclic GFR-binding peptide
  MOD_RES (14)..(15): Xaa is C or S
MIQITINSLDQPVXXPSA

SEQ ID NO: 3731 - protein, 18 aa, Artificial Sequence
  Non-cyclic GFR-binding peptide
  MOD_RES (14)..(15): Xaa is C or S
IKRVQVPRLKTPAXXPKP

SEQ ID NO: 3732 - protein, 16 aa, Artificial Sequence
  Non-cyclic GFR-binding peptide
  MOD_RES (14)..(14): Xaa is C or S
MIQVTINSLKTPAXTP

SEQ ID NO: 3733 - protein, 9 aa, Artificial Sequence
  Non-cyclic GFR-binding peptide
IKRMQVPRL

SEQ ID NO: 3734 - protein, 12 aa, Artificial Sequence
  Non-cyclic GFR-binding peptide
YYVMPLPEEETP

SEQ ID NO: 3735 - protein, 10 aa, Artificial Sequence
  Non-cyclic GFR-binding peptide
VKAMKVSRLE

SEQ ID NO: 3736 - protein, 9 aa, Artificial Sequence
  Non-cyclic GFR-binding peptide
YYLMTLPEE

SEQ ID NO: 3737 - protein, 12 aa, Artificial Sequence
  Non-cyclic GFR-binding peptide
VKAVKVSRLQTP

SEQ ID NO: 3738 - protein, 19 aa, Artificial Sequence
  Non-cyclic GFR-binding peptide
  MOD_RES (14)..(15): Xaa is C or S
MIQMTINSLETPVXXAKPI

SEQ ID NO: 3739 - protein, 13 aa, Artificial Sequence
  Non-cyclic GFR-binding peptide
IKRIQVPRLAQPV

SEQ ID NO: 3740 - protein, 11 aa, Artificial Sequence
  Non-cyclic GFR-binding peptide
YYLVTLPEHHV

SEQ ID NO: 3741 - protein, 10 aa, Artificial Sequence
  Non-cyclic GFR-binding peptide
VKAVKVSRLK

SEQ ID NO: 3742 - protein, 19 aa, Artificial Sequence
  Non-cyclic GFR-binding peptide
  MOD_RES (14)..(15): Xaa is C or S
MIQVTINSLKTPAXXPKPV

SEQ ID NO: 3743 - protein, 16 aa, Artificial Sequence
  Non-cyclic GFR-binding peptide
  MOD_RES (14)..(15): Xaa is C or S
MIQITINSLAQPVXXP

SEQ ID NO: 3744 - protein, 18 aa, Artificial Sequence
  Non-cyclic GFR-binding peptide
  MOD_RES (14)..(15): Xaa is C or S
VKAVKVSRLQTPAXXPKP

SEQ ID NO: 3745 - protein, 16 aa, Artificial Sequence
  Non-cyclic GFR-binding peptide
  MOD_RES (14)..(15): Xaa is C or S
MIQITINSLDQPVXXP

SEQ ID NO: 3746 - protein, 14 aa, Artificial Sequence
  Non-cyclic GFR-binding peptide
YYVVPLPEHHVRSP

SEQ ID NO: 3747 - protein, 17 aa, Artificial Sequence
  Non-cyclic GFR-binding peptide
  MOD_RES (14)..(14): Xaa is C or S
MIQVTINSLKTPAXTPK

SEQ ID NO: 3748 - protein, 20 aa, Artificial Sequence
  Non-cyclic GFR-binding peptide
  MOD_RES (14)..(15): Xaa is C or S
MIQITINSLDQSVXXPSASA

SEQ ID NO: 3749 - protein, 20 aa, Artificial Sequence
  Non-cyclic GFR-binding peptide
  MOD_RES (14)..(14): Xaa is C or S
IKRVQVPRLKTPAXTPKTVH

SEQ ID NO: 3750 - protein, 16 aa, Artificial Sequence
  Non-cyclic GFR-binding peptide
  MOD_RES (14)..(15): Xaa is C or S
IKRVQVPRLQTPAXXP

SEQ ID NO: 3751 - protein, 15 aa, Artificial Sequence
  Non-cyclic GFR-binding peptide
  MOD_RES (14)..(15): Xaa is C or S
MIQITINSLDQSVXX

SEQ ID NO: 3752 - protein, 16 aa, Artificial Sequence
  Non-cyclic GFR-binding peptide
  MOD_RES (14)..(14): Xaa is C or S
YYVMPLPEEETPVXEL

SEQ ID NO: 3753 - protein, 17 aa, Artificial Sequence
  Non-cyclic GFR-binding peptide
  MOD_RES (16)..(16): Xaa is C or S
YYVVPLPELQVQTPRXQ

SEQ ID NO: 3754 - protein, 15 aa, Artificial Sequence
  Non-cyclic GFR-binding peptide
  MOD_RES (14)..(14): Xaa is C or S
IKRVQVPRLKTPAXT

SEQ ID NO: 3755 - protein, 14 aa, Artificial Sequence
  Non-cyclic GFR-binding peptide
  MOD_RES (14)..(14): Xaa is C or S
VKAIKVSRLDQPVX

SEQ ID NO: 3756 - protein, 13 aa, Artificial Sequence
  Non-cyclic GFR-binding peptide
MIQITINSLAQPV

SEQ ID NO: 3757 - protein, 10 aa, Artificial Sequence
  Non-cyclic GFR-binding peptide
YYVMPLPEEE

SEQ ID NO: 3758 - protein, 10 aa, Artificial Sequence
  Non-cyclic GFR-binding peptide
YYVVPLPEHH

SEQ ID NO: 3759 - protein, 14 aa, Artificial Sequence
  Non-cyclic GFR-binding peptide
  MOD_RES (14)..(14): Xaa is C or S
IKRVQVPRLQTPAX

SEQ ID NO: 3760 - protein, 19 aa, Artificial Sequence
  Non-cyclic GFR-binding peptide
  MOD_RES (14)..(15): Xaa is C or S
IKRIQVPRLAQPVXXPAAS

SEQ ID NO: 3761 - protein, 18 aa, Artificial Sequence
  Non-cyclic GFR-binding peptide
  MOD_RES (14)..(14): Xaa is C or S
MIQVTINSLKTPAXTPKT

SEQ ID NO: 3762 - protein, 11 aa, Artificial Sequence
  Non-cyclic GFR-binding peptide
VKAVKVSRLQT

SEQ ID NO: 3763 - protein, 15 aa, Artificial Sequence
  Non-cyclic GFR-binding peptide
  MOD_RES (14)..(15): Xaa is C or S
MIQITINSLDQPVXX

SEQ ID NO: 3764 - protein, 13 aa, Artificial Sequence
  Non-cyclic GFR-binding peptide
IKRVQVPRLKTPA

SEQ ID NO: 3765 - protein, 11 aa, Artificial Sequence
  Non-cyclic GFR-binding peptide
IKRMQVPRLET

SEQ ID NO: 3766 - protein, 13 aa, Artificial Sequence
  Non-cyclic GFR-binding peptide
MIQVTINSLQTPA

SEQ ID NO: 3767 - protein, 13 aa, Artificial Sequence
  Non-cyclic GFR-binding peptide
YYLVTLPELQVQT

SEQ ID NO: 3768 - protein, 15 aa, Artificial Sequence
  Non-cyclic GFR-binding peptide
  MOD_RES (14)..(15): Xaa is C or S
VKAMKVSRLETPVXX

SEQ ID NO: 3769 - protein, 9 aa, Artificial Sequence
  Non-cyclic GFR-binding peptide
YYVVPLPEH

SEQ ID NO: 3770 - protein, 20 aa, Artificial Sequence
  Non-cyclic GFR-binding peptide
  MOD_RES (14)..(15): Xaa is C or S
IKRMQVPRLETPVXXAKPIS

SEQ ID NO: 3771 - protein, 17 aa, Artificial Sequence
  Non-cyclic GFR-binding peptide
  MOD_RES (14)..(14): Xaa is C or S
IKRVQVPRLKTPAXTPK

SEQ ID NO: 3772 - protein, 12 aa, Artificial Sequence
  Non-cyclic GFR-binding peptide
MIQITINSLDQS

SEQ ID NO: 3773 - protein, 16 aa, Artificial Sequence
  Non-cyclic GFR-binding peptide
  MOD_RES (14)..(15): Xaa is C or S
IKRMQVPRLETPVXXA

SEQ ID NO: 3774 - protein, 14 aa, Artificial Sequence
  Non-cyclic GFR-binding peptide
YYLVTLPELQVQTP

SEQ ID NO: 3775 - protein, 15 aa, Artificial Sequence
  Non-cyclic GFR-binding peptide
  MOD_RES (14)..(15): Xaa is C or S
IKRVQVPRLKTPAXX

SEQ ID NO: 3776 - protein, 10 aa, Artificial Sequence
  Non-cyclic GFR-binding peptide
MIQITINSLA

SEQ ID NO: 3777 - protein, 19 aa, Artificial Sequence
  Non-cyclic GFR-binding peptide
  MOD_RES (16)..(16): Xaa is C or S
YYVVPLPELQVQTPRXQVN

SEQ ID NO: 3778 - protein, 13 aa, Artificial Sequence
  Non-cyclic GFR-binding peptide
YYVVPLPELQVQT

SEQ ID NO: 3779 - protein, 17 aa, Artificial Sequence
  Non-cyclic GFR-binding peptide
  MOD_RES (14)..(15): Xaa is C or S
MIQVTINSLQTPAXXPK

SEQ ID NO: 3780 - protein, 19 aa, Artificial Sequence
  Non-cyclic GFR-binding peptide
  MOD_RES (14)..(14): Xaa is C or S
MIQVTINSLKTPAXTPKTV

SEQ ID NO: 3781 - protein, 19 aa, Artificial Sequence
  Non-cyclic GFR-binding peptide
  MOD_RES (14)..(15): Xaa is C or S
VKAVKVSRLKTPAXXPKPV

SEQ ID NO: 3782 - protein, 20 aa, Artificial Sequence
  Non-cyclic GFR-binding peptide
  MOD_RES (14)..(15): Xaa is C or S
VKAIKVSRLDQSVXXPSASA

SEQ ID NO: 3783 - protein, 12 aa, Artificial Sequence
  Non-cyclic GFR-binding peptide
IKRIQVPRLAQP

SEQ ID NO: 3784 - protein, 14 aa, Artificial Sequence
  Non-cyclic GFR-binding peptide
  MOD_RES (14)..(14): Xaa is C or S
IKRIQVPRLAQPVX

SEQ ID NO: 3785 - protein, 18 aa, Artificial Sequence
  Non-cyclic GFR-binding peptide
  MOD_RES (14)..(15): Xaa is C or S
IKRMQVPRLETPVXXAKP

SEQ ID NO: 3786 - protein, 20 aa, Artificial Sequence
  Non-cyclic GFR-binding peptide
  MOD_RES (14)..(15): Xaa is C or S
MIQMTINSLETPVXXAKPIK

SEQ ID NO: 3787 - protein, 18 aa, Artificial Sequence
  Non-cyclic GFR-binding peptide
  MOD_RES (14)..(15): Xaa is C or S
IKRIQVPRLDQSVXXPSA

SEQ ID NO: 3788 - protein, 15 aa, Artificial Sequence
  Non-cyclic GFR-binding peptide
  MOD_RES (14)..(15): Xaa is C or S
MIQVTINSLKTPAXX

SEQ ID NO: 3789 - protein, 20 aa, Artificial Sequence
  Non-cyclic GFR-binding peptide
  MOD_RES (14)..(15): Xaa is C or S
IKRIQVPRLDQSVXXPSASA

SEQ ID NO: 3790 - protein, 13 aa, Artificial Sequence
  Non-cyclic GFR-binding peptide
MIQITINSLDQPV

SEQ ID NO: 3791 - protein, 11 aa, Artificial Sequence
  Non-cyclic GFR-binding peptide
YYVVPLPELQV

SEQ ID NO: 3792 - protein, 20 aa, Artificial Sequence
  Non-cyclic GFR-binding peptide
  MOD_RES (16)..(16): Xaa is C or S
YYVVPLPELQVQTPRXQVNR

SEQ ID NO: 3793 - protein, 19 aa, Artificial Sequence
  Non-cyclic GFR-binding peptide
  MOD_RES (14)..(15): Xaa is C or S
IKRVQVPRLKTPAXXPKPV

SEQ ID NO: 3794 - protein, 17 aa, Artificial Sequence
  Non-cyclic GFR-binding peptide
  MOD_RES (14)..(14): Xaa is C or S
VKAVKVSRLKTPAXTPK

SEQ ID NO: 3795 - protein, 20 aa, Artificial Sequence
  Non-cyclic GFR-binding peptide
  MOD_RES (14)..(15): Xaa is C or S
VKAVKVSRLQTPAXXPKPVT

SEQ ID NO: 3796 - protein, 9 aa, Artificial Sequence
  Non-cyclic GFR-binding peptide
MIQITINSL

SEQ ID NO: 3797 - protein, 18 aa, Artificial Sequence
  Non-cyclic GFR-binding peptide
  MOD_RES (14)..(15): Xaa is C or S
VKAIKVSRLDQPVXXPSA

SEQ ID NO: 3798 - protein, 12 aa, Artificial Sequence
  Non-cyclic GFR-binding peptide
IKRIQVPRLDQP

SEQ ID NO: 3799 - protein, 11 aa, Artificial Sequence
  Non-cyclic GFR-binding peptide
IKRVQVPRLKT

SEQ ID NO: 3800 - protein, 16 aa, Artificial Sequence
  Non-cyclic GFR-binding peptide
  MOD_RES (14)..(14): Xaa is C or S
YYLMTLPEEETPVXEL

SEQ ID NO: 3801 - protein, 20 aa, Artificial Sequence
  Non-cyclic GFR-binding peptide
  MOD_RES (14)..(15): Xaa is C or S
IKRMQVPRLETPVXXAKPIK

SEQ ID NO: 3802 - protein, 18 aa, Artificial Sequence
  Non-cyclic GFR-binding peptide
  MOD_RES (14)..(15): Xaa is C or S
MIQITINSLDQSVXXPSA

SEQ ID NO: 3803 - protein, 14 aa, Artificial Sequence
  Non-cyclic GFR-binding peptide
  MOD_RES (14)..(14): Xaa is C or S
VKAVKVSRLQTPAX

SEQ ID NO: 3804 - protein, 15 aa, Artificial Sequence
  Non-cyclic GFR-binding peptide
  MOD_RES (14)..(15): Xaa is C or S
MIQITINSLAQPVXX

SEQ ID NO: 3805 - protein, 14 aa, Artificial Sequence
  Non-cyclic GFR-binding peptide
  MOD_RES (14)..(14): Xaa is C or S
IKRIQVPRLDQPVX

SEQ ID NO: 3806 - protein, 18 aa, Artificial Sequence
  Non-cyclic GFR-binding peptide
  MOD_RES (14)..(15): Xaa is C or S
MIQVTINSLKTPAXXPKP

SEQ ID NO: 3807 - protein, 15 aa, Artificial Sequence
  Non-cyclic GFR-binding peptide
YYVVPLPELQVQTPR

SEQ ID NO: 3808 - protein, 12 aa, Artificial Sequence
  Non-cyclic GFR-binding peptide
MIQITINSLAQP

SEQ ID NO: 3809 - protein, 18 aa, Artificial Sequence
  Non-cyclic GFR-binding peptide
  MOD_RES (14)..(15): Xaa is C or S
VKAMKVSRLETPVXXAKP

SEQ ID NO: 3810 - protein, 19 aa, Artificial Sequence
  Non-cyclic GFR-binding peptide
  MOD_RES (14)..(15): Xaa is C or S
VKAIKVSRLAQPVXXPAAS

SEQ ID NO: 3811 - protein, 16 aa, Artificial Sequence
  Non-cyclic GFR-binding peptide
  MOD_RES (16)..(16): Xaa is C or S
YYLVTLPELQVQTPRX

SEQ ID NO: 3812 - protein, 14 aa, Artificial Sequence
  Non-cyclic GFR-binding peptide
  MOD_RES (14)..(14): Xaa is C or S
MIQITINSLDQSVX

SEQ ID NO: 3813 - protein, 15 aa, Artificial Sequence
  Non-cyclic GFR-binding peptide
  MOD_RES (14)..(14): Xaa is C or S
YYVMPLPEEETPVXE

SEQ ID NO: 3814 - protein, 17 aa, Artificial Sequence
  Non-cyclic GFR-binding peptide
  MOD_RES (14)..(15): Xaa is C or S
IKRMQVPRLETPVXXAK

SEQ ID NO: 3815 - protein, 18 aa, Artificial Sequence
  Non-cyclic GFR-binding peptide
  MOD_RES (14)..(15): Xaa is C or S
IKRVQVPRLQTPAXXPKP

SEQ ID NO: 3816 - protein, 17 aa, Artificial Sequence
  Non-cyclic GFR-binding peptide
  MOD_RES (16)..(16): Xaa is C or S
YYLVTLPEHHVRSPQXK

SEQ ID NO: 3817 - protein, 15 aa, Artificial Sequence
  Non-cyclic GFR-binding peptide
  MOD_RES (14)..(15): Xaa is C or S
IKRVQVPRLQTPAXX

SEQ ID NO: 3818 - protein, 10 aa, Artificial Sequence
  Non-cyclic GFR-binding peptide
YYLMTLPEEE

SEQ ID NO: 3819 - protein, 9 aa, Artificial Sequence
  Non-cyclic GFR-binding peptide
YYLVTLPEH

SEQ ID NO: 3820 - protein, 13 aa, Artificial Sequence
  Non-cyclic GFR-binding peptide
VKAMKVSRLETPV

SEQ ID NO: 3821 - protein, 17 aa, Artificial Sequence
  Non-cyclic GFR-binding peptide
  MOD_RES (14)..(15): Xaa is C or S
MIQVTINSLKTPAXXPK

SEQ ID NO: 3822 - protein, 10 aa, Artificial Sequence
  Non-cyclic GFR-binding peptide
MIQITINSLD

SEQ ID NO: 3823 - protein, 19 aa, Artificial Sequence
  Non-cyclic GFR-binding peptide
  MOD_RES (16)..(16): Xaa is C or S
YYLVTLPEHHVRSPQXKVS

SEQ ID NO: 3824 - protein, 20 aa, Artificial Sequence
  Non-cyclic GFR-binding peptide
  MOD_RES (14)..(15): Xaa is C or S
VKAMKVSRLETPVXXAKPIS

SEQ ID NO: 3825 - protein, 16 aa, Artificial Sequence
  Non-cyclic GFR-binding peptide
  MOD_RES (14)..(15): Xaa is C or S
MIQVTINSLQTPAXXP

SEQ ID NO: 3826 - protein, 20 aa, Artificial Sequence
  Non-cyclic GFR-binding peptide
  MOD_RES (14)..(14): Xaa is C or S
MIQVTINSLKTPAXTPKTVH

SEQ ID NO: 3827 - protein, 19 aa, Artificial Sequence
  Non-cyclic GFR-binding peptide
  MOD_RES (16)..(16): Xaa is C or S
YYLVTLPELQVQTPRXQVN

SEQ ID NO: 3828 - protein, 14 aa, Artificial Sequence
  Non-cyclic GFR-binding peptide
  MOD_RES (14)..(14): Xaa is C or S
IKRVQVPRLKTPAX

SEQ ID NO: 3829 - protein, 11 aa, Artificial Sequence
  Non-cyclic GFR-binding peptide
QDLSNITIQIM

SEQ ID NO: 3830 - protein, 15 aa, Artificial Sequence
  Non-cyclic GFR-binding peptide
  MOD_RES (1)..(2): Xaa is C or S
XXVSQDLRSVKIAKV

SEQ ID NO: 3831 - protein, 10 aa, Artificial Sequence
  Non-cyclic GFR-binding peptide
KLSNITVQIM

SEQ ID NO: 3832 - protein, 15 aa, Artificial Sequence
  Non-cyclic GFR-binding peptide
  MOD_RES (2)..(2): Xaa is C or S
TXAPTKLRSVKVAKV

SEQ ID NO: 3833 - protein, 20 aa, Artificial Sequence
  Non-cyclic GFR-binding peptide
  MOD_RES (6)..(7): Xaa is C or S
YVPKPXXAPTKLRSVKVAKV

SEQ ID NO: 3834 - protein, 12 aa, Artificial Sequence
  Non-cyclic GFR-binding peptide
PTELRSVKMAKV

SEQ ID NO: 3835 - protein, 9 aa, Artificial Sequence
  Non-cyclic GFR-binding peptide
LRSVKMAKV

SEQ ID NO: 3836 - protein, 19 aa, Artificial Sequence
  Non-cyclic GFR-binding peptide
  MOD_RES (6)..(6): Xaa is C or S
VTKPTXAPTKLRPVQVRKI

SEQ ID NO: 3837 - protein, 20 aa, Artificial Sequence
  Non-cyclic GFR-binding peptide
  MOD_RES (6)..(7): Xaa is C or S
ASAAPXXVPQALSNITIQIM

SEQ ID NO: 3838 - protein, 19 aa, Artificial Sequence
  Non-cyclic GFR-binding peptide
  MOD_RES (5)..(6): Xaa is C or S
VPKPXXAPTQLRSVKVAKV

SEQ ID NO: 3839 - protein, 11 aa, Artificial Sequence
  Non-cyclic GFR-binding peptide
TELSNITMQIM

SEQ ID NO: 3840 - protein, 16 aa, Artificial Sequence
  Non-cyclic GFR-binding peptide
  MOD_RES (2)..(3): Xaa is C or S
PXXVSQDLRSVKIAKV

SEQ ID NO: 3841 - protein, 9 aa, Artificial Sequence
  Non-cyclic GFR-binding peptide
LRPVQIRKI

SEQ ID NO: 3842 - protein, 20 aa, Artificial Sequence
  Non-cyclic GFR-binding peptide
  MOD_RES (7)..(7): Xaa is C or S
HVTKPTXAPTKLRSVKVAKV

SEQ ID NO: 3843 - protein, 12 aa, Artificial Sequence
  Non-cyclic GFR-binding peptide
PTKLRSVKVAKV

SEQ ID NO: 3844 - protein, 13 aa, Artificial Sequence
  Non-cyclic GFR-binding peptide
APTKLRSVKVAKV

SEQ ID NO: 3845 - protein, 11 aa, Artificial Sequence
  Non-cyclic GFR-binding peptide
VQLEPLTVLYY

SEQ ID NO: 3846 - protein, 17 aa, Artificial Sequence
  Non-cyclic GFR-binding peptide
  MOD_RES (3)..(4): Xaa is C or S
APXXVPQALRPVQIRKI

SEQ ID NO: 3847 - protein, 15 aa, Artificial Sequence
  Non-cyclic GFR-binding peptide
RPTQVQLEPLTVLYY

SEQ ID NO: 3848 - protein, 18 aa, Artificial Sequence
  Non-cyclic GFR-binding peptide
  MOD_RES (4)..(5): Xaa is C or S
PKPXXAPTQLSNITVQIM

SEQ ID NO: 3849 - protein, 14 aa, Artificial Sequence
  Non-cyclic GFR-binding peptide
  MOD_RES (1)..(1): Xaa is C or S
XVPTELSNITMQIM

SEQ ID NO: 3850 - protein, 13 aa, Artificial Sequence
  Non-cyclic GFR-binding peptide
VSQDLRSVKIAKV

SEQ ID NO: 3851 - protein, 14 aa, Artificial Sequence
  Non-cyclic GFR-binding peptide
  MOD_RES (1)..(1): Xaa is C or S
XVPQDLSNITIQIM

SEQ ID NO: 3852 - protein, 18 aa, Artificial Sequence
  Non-cyclic GFR-binding peptide
  MOD_RES (5)..(5): Xaa is C or S
TKPTXAPTKLRPVQVRKI

SEQ ID NO: 3853 - protein, 14 aa, Artificial Sequence
  Non-cyclic GFR-binding peptide
  MOD_RES (1)..(1): Xaa is C or S
XVPTEEEPLTMLYY

SEQ ID NO: 3854 - protein, 14 aa, Artificial Sequence
  Non-cyclic GFR-binding peptide
  MOD_RES (1)..(1): Xaa is C or S
XVPTELRPVQMRKI

SEQ ID NO: 3855 - protein, 17 aa, Artificial Sequence
  Non-cyclic GFR-binding peptide
  MOD_RES (3)..(4): Xaa is C or S
KPXXAPTQLRPVQVRKI

SEQ ID NO: 3856 - protein, 17 aa, Artificial Sequence
  Non-cyclic GFR-binding peptide
  MOD_RES (3)..(4): Xaa is C or S
KPXXAPTKLRPVQVRKI

SEQ ID NO: 3857 - protein, 17 aa, Artificial Sequence
  Non-cyclic GFR-binding peptide
  MOD_RES (2)..(2): Xaa is C or S
KXQPSRVHHEPLPVVYY

SEQ ID NO: 3858 - protein, 20 aa, Artificial Sequence
  Non-cyclic GFR-binding peptide
  MOD_RES (6)..(7): Xaa is C or S
ASASPXXVPQDLRPVQIRKI

SEQ ID NO: 3859 - protein, 11 aa, Artificial Sequence
  Non-cyclic GFR-binding peptide
TQLRPVQVRKI

SEQ ID NO: 3860 - protein, 17 aa, Artificial Sequence
  Non-cyclic GFR-binding peptide
  MOD_RES (3)..(4): Xaa is C or S
APXXVPQALSNITIQIM

SEQ ID NO: 3861 - protein, 16 aa, Artificial Sequence
  Non-cyclic GFR-binding peptide
  MOD_RES (2)..(3): Xaa is C or S
PXXVPQALRSVKIAKV

SEQ ID NO: 3862 - protein, 18 aa, Artificial Sequence
  Non-cyclic GFR-binding peptide
  MOD_RES (4)..(5): Xaa is C or S
PKAXXVPTELSNITMQIM

SEQ ID NO: 3863 - protein, 17 aa, Artificial Sequence
  Non-cyclic GFR-binding peptide
  MOD_RES (3)..(4): Xaa is C or S
KAXXVPTELSNITMQIM

SEQ ID NO: 3864 - protein, 12 aa, Artificial Sequence
  Non-cyclic GFR-binding peptide
PTQLSNITVQIM

SEQ ID NO: 3865 - protein, 17 aa, Artificial Sequence
  Non-cyclic GFR-binding peptide
  MOD_RES (3)..(4): Xaa is C or S
SPXXVSQDLRSVKIAKV

SEQ ID NO: 3866 - protein, 13 aa, Artificial Sequence
  Non-cyclic GFR-binding peptide
VPTELRPVQMRKI

SEQ ID NO: 3867 - protein, 20 aa, Artificial Sequence
  Non-cyclic GFR-binding peptide
  MOD_RES (6)..(7): Xaa is C or S
ASAAPXXVPQALRPVQIRKI

SEQ ID NO: 3868 - protein, 15 aa, Artificial Sequence
  Non-cyclic GFR-binding peptide
  MOD_RES (1)..(2): Xaa is C or S
XXAPTKLRSVKVAKV

SEQ ID NO: 3869 - protein, 10 aa, Artificial Sequence
  Non-cyclic GFR-binding peptide
ELSNITMQIM

SEQ ID NO: 3870 - protein, 19 aa, Artificial Sequence
  Non-cyclic GFR-binding peptide
  MOD_RES (5)..(6): Xaa is C or S
SASPXXVSQDLRSVKIAKV

SEQ ID NO: 3871 - protein, 14 aa, Artificial Sequence
  Non-cyclic GFR-binding peptide
  MOD_RES (1)..(1): Xaa is C or S
XVPTEEEPLPMVYY

SEQ ID NO: 3872 - protein, 19 aa, Artificial Sequence
  Non-cyclic GFR-binding peptide
  MOD_RES (5)..(6): Xaa is C or S
IPKAXXVPTELRSVKMAKV

SEQ ID NO: 3873 - protein, 20 aa, Artificial Sequence
  Non-cyclic GFR-binding peptide
  MOD_RES (7)..(7): Xaa is C or S
NDEGLEXVPTEEEPLTMLYY

SEQ ID NO: 3874 - protein, 14 aa, Artificial Sequence
  Non-cyclic GFR-binding peptide
  MOD_RES (1)..(1): Xaa is C or S
XVPQALRSVKIAKV

SEQ ID NO: 3875 - protein, 15 aa, Artificial Sequence
  Non-cyclic GFR-binding peptide
  MOD_RES (1)..(2): Xaa is C or S
XXVPTELRPVQMRKI

SEQ ID NO: 3876 - protein, 14 aa, Artificial Sequence
  Non-cyclic GFR-binding peptide
  MOD_RES (1)..(1): Xaa is C or S
XVSQDLRPVQIRKI

SEQ ID NO: 3877 - protein, 15 aa, Artificial Sequence
  Non-cyclic GFR-binding peptide
  MOD_RES (2)..(2): Xaa is C or S
EXVPTEEEPLTMLYY

SEQ ID NO: 3878 - protein, 16 aa, Artificial Sequence
  Non-cyclic GFR-binding peptide
  MOD_RES (2)..(3): Xaa is C or S
AXXVPTELRSVKMAKV

SEQ ID NO: 3879 - protein, 14 aa, Artificial Sequence
  Non-cyclic GFR-binding peptide
  MOD_RES (1)..(1): Xaa is C or S
XAPTKLSNITVQIM

SEQ ID NO: 3880 - protein, 13 aa, Artificial Sequence
  Non-cyclic GFR-binding peptide
APTQLRSVKVAKV

SEQ ID NO: 3881 - protein, 15 aa, Artificial Sequence
  Non-cyclic GFR-binding peptide
  MOD_RES (1)..(2): Xaa is C or S
XXAPTQLRSVKVAKV

SEQ ID NO: 3882 - protein, 16 aa, Artificial Sequence
  Non-cyclic GFR-binding peptide
  MOD_RES (1)..(1): Xaa is C or S
XRPTQVQLEPLPVVYY

SEQ ID NO: 3883 - protein, 17 aa, Artificial Sequence
  Non-cyclic GFR-binding peptide
  MOD_RES (3)..(4): Xaa is C or S
SPXXVPQDLSNITIQIM

SEQ ID NO: 3884 - protein, 10 aa, Artificial Sequence
  Non-cyclic GFR-binding peptide
DLRPVQIRKI

SEQ ID NO: 3885 - protein, 12 aa, Artificial Sequence
  Non-cyclic GFR-binding peptide
QVQLEPLTVLYY

SEQ ID NO: 3886 - protein, 11 aa, Artificial Sequence
  Non-cyclic GFR-binding peptide
TKLSNITVQIM

SEQ ID NO: 3887 - protein, 13 aa, Artificial Sequence
  Non-cyclic GFR-binding peptide
VPQDLRPVQIRKI

SEQ ID NO: 3888 - protein, 12 aa, Artificial Sequence
  Non-cyclic GFR-binding peptide
PQDLRSVKIAKV

SEQ ID NO: 3889 - protein, 15 aa, Artificial Sequence
  Non-cyclic GFR-binding peptide
  MOD_RES (1)..(2): Xaa is C or S
XXVPQDLRPVQIRKI

SEQ ID NO: 3890 - protein, 15 aa, Artificial Sequence
  Non-cyclic GFR-binding peptide
  MOD_RES (1)..(2): Xaa is C or S
XXVPTELSNITMQIM

SEQ ID NO: 3891 - protein, 20 aa, Artificial Sequence
  Non-cyclic GFR-binding peptide
  MOD_RES (6)..(7): Xaa is C or S
KIPKAXXVPTELRSVKMAKV

SEQ ID NO: 3892 - protein, 13 aa, Artificial Sequence
  Non-cyclic GFR-binding peptide
VPTEEEPLTMLYY

SEQ ID NO: 3893 - protein, 12 aa, Artificial Sequence
  Non-cyclic GFR-binding peptide
SQDLRSVKIAKV

SEQ ID NO: 3894 - protein, 16 aa, Artificial Sequence
  Non-cyclic GFR-binding peptide
  MOD_RES (2)..(3): Xaa is C or S
PXXVPQDLRSVKIAKV

SEQ ID NO: 3895 - protein, 19 aa, Artificial Sequence
  Non-cyclic GFR-binding peptide
  MOD_RES (6)..(6): Xaa is C or S
DEGLEXVPTEEEPLTMLYY

SEQ ID NO: 3896 - protein, 17 aa, Artificial Sequence
  Non-cyclic GFR-binding peptide
  MOD_RES (3)..(4): Xaa is C or S
KPXXAPTQLRSVKVAKV

SEQ ID NO: 3897 - protein, 14 aa, Artificial Sequence
  Non-cyclic GFR-binding peptide
PTQVQLEPLPVVYY

SEQ ID NO: 3898 - protein, 15 aa, Artificial Sequence
  Non-cyclic GFR-binding peptide
  MOD_RES (1)..(2): Xaa is C or S
XXVPQDLRSVKIAKV

SEQ ID NO: 3899 - protein, 19 aa, Artificial Sequence
  Non-cyclic GFR-binding peptide
  MOD_RES (5)..(6): Xaa is C or S
IPKAXXVPTELRPVQMRKI

SEQ ID NO: 3900 - protein, 18 aa, Artificial Sequence
  Non-cyclic GFR-binding peptide
  MOD_RES (3)..(3): Xaa is C or S
VKXQPSRVHHEPLPVVYY

SEQ ID NO: 3901 - protein, 16 aa, Artificial Sequence
  Non-cyclic GFR-binding peptide
  MOD_RES (1)..(1): Xaa is C or S
XQPSRVHHEPLPVVYY

SEQ ID NO: 3902 - protein, 19 aa, Artificial Sequence
  Non-cyclic GFR-binding peptide
  MOD_RES (5)..(6): Xaa is C or S
SASPXXVSQDLSNITIQIM

SEQ ID NO: 3903 - protein, 12 aa, Artificial Sequence
  Non-cyclic GFR-binding peptide
RVHHEPLTVLYY

SEQ ID NO: 3904 - protein, 17 aa, Artificial Sequence
  Non-cyclic GFR-binding peptide
  MOD_RES (3)..(4): Xaa is C or S
SPXXVSQDLRPVQIRKI

SEQ ID NO: 3905 - protein, 18 aa, Artificial Sequence
  Non-cyclic GFR-binding peptide
  MOD_RES (5)..(5): Xaa is C or S
TKPTXAPTKLRSVKVAKV

SEQ ID NO: 3906 - protein, 10 aa, Artificial Sequence
  Non-cyclic GFR-binding peptide
KLRPVQVRKI

SEQ ID NO: 3907 - protein, 19 aa, Artificial Sequence
  Non-cyclic GFR-binding peptide
  MOD_RES (5)..(6): Xaa is C or S
SASPXXVPQDLRPVQIRKI

SEQ ID NO: 3908 - protein, 11 aa, Artificial Sequence
  Non-cyclic GFR-binding peptide
VHHEPLPVVYY

SEQ ID NO: 3909 - protein, 16 aa, Artificial Sequence
  Non-cyclic GFR-binding peptide
  MOD_RES (3)..(3): Xaa is C or S
PTXAPTKLRSVKVAKV

SEQ ID NO: 3910 - protein, 11 aa, Artificial Sequence
  Non-cyclic GFR-binding peptide
QDLRPVQIRKI

SEQ ID NO: 3911 - protein, 11 aa, Artificial Sequence
  Non-cyclic GFR-binding peptide
TEEEPLPMVYY

SEQ ID NO: 3912 - protein, 10 aa, Artificial Sequence
  Non-cyclic GFR-binding peptide
HHEPLTVLYY

SEQ ID NO: 3913 - protein, 11 aa, Artificial Sequence
  Non-cyclic GFR-binding peptide
TQLSNITVQIM

SEQ ID NO: 3914 - protein, 17 aa, Artificial Sequence
  Non-cyclic GFR-binding peptide
  MOD_RES (4)..(4): Xaa is C or S
GLEXVPTEEEPLTMLYY

SEQ ID NO: 3915 - protein, 18 aa, Artificial Sequence
  Non-cyclic GFR-binding peptide
  MOD_RES (5)..(5): Xaa is C or S
EGLEXVPTEEEPLTMLYY

SEQ ID NO: 3916 - protein, 18 aa, Artificial Sequence
  Non-cyclic GFR-binding peptide
  MOD_RES (4)..(5): Xaa is C or S
PKPXXAPTKLRSVKVAKV

SEQ ID NO: 3917 - protein, 15 aa, Artificial Sequence
  Non-cyclic GFR-binding peptide
QPSRVHHEPLTVLYY

SEQ ID NO: 3918 - protein, 16 aa, Artificial Sequence
  Non-cyclic GFR-binding peptide
  MOD_RES (2)..(3): Xaa is C or S
PXXAPTKLRPVQVRKI

SEQ ID NO: 3919 - protein, 13 aa, Artificial Sequence
  Non-cyclic GFR-binding peptide
VPQDLRSVKIAKV

SEQ ID NO: 3920 - protein, 10 aa, Artificial Sequence
  Non-cyclic GFR-binding peptide
DLRSVKIAKV

SEQ ID NO: 3921 - protein, 11 aa, Artificial Sequence
  Non-cyclic GFR-binding peptide
QALRSVKIAKV

SEQ ID NO: 3922 - protein, 20 aa, Artificial Sequence
  Non-cyclic GFR-binding peptide
  MOD_RES (6)..(7): Xaa is C or S
TVPKPXXAPTQLSNITVQIM

SEQ ID NO: 3923 - protein, 12 aa, Artificial Sequence
  Non-cyclic GFR-binding peptide
PTELRPVQMRKI

SEQ ID NO: 3924 - protein, 20 aa, Artificial Sequence
  Non-cyclic GFR-binding peptide
  MOD_RES (7)..(7): Xaa is C or S
NDEGLEXVPTEEEPLPMVYY

SEQ ID NO: 3925 - protein, 16 aa, Artificial Sequence
  Non-cyclic GFR-binding peptide
  MOD_RES (2)..(3): Xaa is C or S
PXXAPTKLRSVKVAKV

SEQ ID NO: 3926 - protein, 18 aa, Artificial Sequence
  Non-cyclic GFR-binding peptide
  MOD_RES (5)..(5): Xaa is C or S
EGLEXVPTEEEPLPMVYY

SEQ ID NO: 3927 - protein, 17 aa, Artificial Sequence
  Non-cyclic GFR-binding peptide
  MOD_RES (3)..(4): Xaa is C or S
SPXXVSQDLSNITIQIM

SEQ ID NO: 3928 - protein, 12 aa, Artificial Sequence
  Non-cyclic GFR-binding peptide
RVHHEPLPVVYY

SEQ ID NO: 3929 - protein, 16 aa, Artificial Sequence
  Non-cyclic GFR-binding peptide
  MOD_RES (3)..(3): Xaa is C or S
PTXAPTKLRPVQVRKI

SEQ ID NO: 3930 - protein, 14 aa, Artificial Sequence
  Non-cyclic GFR-binding peptide
PSRVHHEPLTVLYY

SEQ ID NO: 3931 - protein, 15 aa, Artificial Sequence
  Non-cyclic GFR-binding peptide
QPSRVHHEPLPVVYY

SEQ ID NO: 3932 - protein, 16 aa, Artificial Sequence
  Non-cyclic GFR-binding peptide
  MOD_RES (2)..(3): Xaa is C or S
PXXAPTQLRSVKVAKV

SEQ ID NO: 3933 - protein, 15 aa, Artificial Sequence
  Non-cyclic GFR-binding peptide
  MOD_RES (1)..(2): Xaa is C or S
XXVPQALRSVKIAKV

SEQ ID NO: 3934 - protein, 13 aa, Artificial Sequence
  Non-cyclic GFR-binding peptide
VPTELSNITMQIM

SEQ ID NO: 3935 - protein, 10 aa, Artificial Sequence
  Non-cyclic GFR-binding peptide
ALRSVKIAKV

SEQ ID NO: 3936 - protein, 15 aa, Artificial Sequence
  Non-cyclic GFR-binding peptide
  MOD_RES (1)..(2): Xaa is C or S
XXVSQDLRPVQIRKI

SEQ ID NO: 3937 - protein, 18 aa, Artificial Sequence
  Non-cyclic GFR-binding peptide
  MOD_RES (3)..(3): Xaa is C or S
VKXQPSRVHHEPLTVLYY

SEQ ID NO: 3938 - protein, 12 aa, Artificial Sequence
  Non-cyclic GFR-binding peptide
PTKLSNITVQIM

SEQ ID NO: 3939 - protein, 20 aa, Artificial Sequence
  Non-cyclic GFR-binding peptide
  MOD_RES (5)..(5): Xaa is C or S
SSVKXQPSRVHHEPLPVVYY

SEQ ID NO: 3940 - protein, 20 aa, Artificial Sequence
  Non-cyclic GFR-binding peptide
  MOD_RES (6)..(7): Xaa is C or S
YVPKPXXAPTKLRPVQVRKI

SEQ ID NO: 3941 - protein, 16 aa, Artificial Sequence
  Non-cyclic GFR-binding peptide
  MOD_RES (2)..(3): Xaa is C or S
PXXVPQDLRPVQIRKI

SEQ ID NO: 3942 - protein, 12 aa, Artificial Sequence
  Non-cyclic GFR-binding peptide
QVQLEPLPVVYY

SEQ ID NO: 3943 - protein, 11 aa, Artificial Sequence
  Non-cyclic GFR-binding peptide
TEEEPLTMLYY

SEQ ID NO: 3944 - protein, 12 aa, Artificial Sequence
  Non-cyclic GFR-binding peptide
PTQLRPVQVRKI

SEQ ID NO: 3945 - protein, 11 aa, Artificial Sequence
  Non-cyclic GFR-binding peptide
QALRPVQIRKI

SEQ ID NO: 3946 - protein, 14 aa, Artificial Sequence
  Non-cyclic GFR-binding peptide
  MOD_RES (1)..(1): Xaa is C or S
XVSQDLRSVKIAKV

SEQ ID NO: 3947 - protein, 20 aa, Artificial Sequence
  Non-cyclic GFR-binding peptide
  MOD_RES (6)..(7): Xaa is C or S
ASASPXXVPQDLSNITIQIM

SEQ ID NO: 3948 - protein, 19 aa, Artificial Sequence
  Non-cyclic GFR-binding peptide
  MOD_RES (5)..(6): Xaa is C or S
SAAPXXVPQALSNITIQIM

SEQ ID NO: 3949 - protein, 13 aa, Artificial Sequence
  Non-cyclic GFR-binding peptide
VSQDLRPVQIRKI

SEQ ID NO: 3950 - protein, 17 aa, Artificial Sequence
  Non-cyclic GFR-binding peptide
  MOD_RES (3)..(4): Xaa is C or S
SPXXVPQDLRPVQIRKI

SEQ ID NO: 3951 - protein, 19 aa, Artificial Sequence
  Non-cyclic GFR-binding peptide
  MOD_RES (6)..(6): Xaa is C or S
DEGLEXVPTEEEPLPMVYY

SEQ ID NO: 3952 - protein, 18 aa, Artificial Sequence
  Non-cyclic GFR-binding peptide
  MOD_RES (4)..(5): Xaa is C or S
AAPXXVPQALRSVKIAKV

SEQ ID NO: 3953 - protein, 13 aa, Artificial Sequence
  Non-cyclic GFR-binding peptide
VPTEEEPLPMVYY

SEQ ID NO: 3954 - protein, 13 aa, Artificial Sequence
  Non-cyclic GFR-binding peptide
VPQALRSVKIAKV

SEQ ID NO: 3955 - protein, 13 aa, Artificial Sequence
  Non-cyclic GFR-binding peptide
SRVHHEPLPVVYY

SEQ ID NO: 3956 - protein, 10 aa, Artificial Sequence
  Non-cyclic GFR-binding peptide
ELRPVQMRKI

SEQ ID NO: 3957 - protein, 16 aa, Artificial Sequence
  Non-cyclic GFR-binding peptide
  MOD_RES (1)..(1): Xaa is C or S
XQPSRVHHEPLTVLYY

SEQ ID NO: 3958 - protein, 9 aa, Artificial Sequence
  Non-cyclic GFR-binding peptide
EEPLPMVYY

SEQ ID NO: 3959 - protein, 19 aa, Artificial Sequence
  Non-cyclic GFR-binding peptide
  MOD_RES (5)..(6): Xaa is C or S
SASPXXVPQDLRSVKIAKV

SEQ ID NO: 3960 - protein, 17 aa, Artificial Sequence
  Non-cyclic GFR-binding peptide
  MOD_RES (4)..(4): Xaa is C or S
GLEXVPTEEEPLPMVYY

SEQ ID NO: 3961 - protein, 10 aa, Artificial Sequence
  Non-cyclic GFR-binding peptide
ALRPVQIRKI

SEQ ID NO: 3962 - protein, 16 aa, Artificial Sequence
  Non-cyclic GFR-binding peptide
  MOD_RES (2)..(3): Xaa is C or S
PXXVPQALRPVQIRKI

SEQ ID NO: 3963 - protein, 20 aa, Artificial Sequence
  Non-cyclic GFR-binding peptide
  MOD_RES (6)..(7): Xaa is C or S
SIPKAXXVPTELSNITMQIM

SEQ ID NO: 3964 - protein, 12 aa, Artificial Sequence
  Non-cyclic GFR-binding peptide
PTELSNITMQIM

SEQ ID NO: 3965 - protein, 20 aa, Artificial Sequence
  Non-cyclic GFR-binding peptide
  MOD_RES (6)..(7): Xaa is C or S
ASASPXXVPQDLRSVKIAKV

SEQ ID NO: 3966 - protein, 17 aa, Artificial Sequence
  Non-cyclic GFR-binding peptide
  MOD_RES (3)..(4): Xaa is C or S
KPXXAPTKLRSVKVAKV

SEQ ID NO: 3967 - protein, 19 aa, Artificial Sequence
  Non-cyclic GFR-binding peptide
  MOD_RES (5)..(6): Xaa is C or S
SASPXXVSQDLRPVQIRKI

SEQ ID NO: 3968 - protein, 9 aa, Artificial Sequence
  Non-cyclic GFR-binding peptide
LSNITMQIM

SEQ ID NO: 3969 - protein, 15 aa, Artificial Sequence
  Non-cyclic GFR-binding peptide
  MOD_RES (2)..(2): Xaa is C or S
TXAPTKLSNITVQIM

SEQ ID NO: 3970 - protein, 20 aa, Artificial Sequence
  Non-cyclic GFR-binding peptide
  MOD_RES (6)..(7): Xaa is C or S
ASAAPXXVPQALRSVKIAKV

SEQ ID NO: 3971 - protein, 13 aa, Artificial Sequence
  Non-cyclic GFR-binding peptide
APTQLRPVQVRKI

SEQ ID NO: 3972 - protein, 13 aa, Artificial Sequence
  Non-cyclic GFR-binding peptide
APTKLSNITVQIM

SEQ ID NO: 3973 - protein, 15 aa, Artificial Sequence
  Non-cyclic GFR-binding peptide
  MOD_RES (1)..(2): Xaa is C or S
XXVPQALRPVQIRKI

SEQ ID NO: 3974 - protein, 14 aa, Artificial Sequence
  Non-cyclic GFR-binding peptide
  MOD_RES (1)..(1): Xaa is C or S
XVPTELRSVKMAKV

SEQ ID NO: 3975 - protein, 11 aa, Artificial Sequence
  Non-cyclic GFR-binding peptide
QDLRSVKIAKV

SEQ ID NO: 3976 - protein, 14 aa, Artificial Sequence
  Non-cyclic GFR-binding peptide
  MOD_RES (1)..(1): Xaa is C or S
XVPQALSNITIQIM

SEQ ID NO: 3977 - protein, 20 aa, Artificial Sequence
  Non-cyclic GFR-binding peptide
  MOD_RES (6)..(7): Xaa is C or S
YVPKPXXAPTKLSNITVQIM

SEQ ID NO: 3978 - protein, 18 aa, Artificial Sequence
  Non-cyclic GFR-binding peptide
  MOD_RES (4)..(5): Xaa is C or S
ASPXXVPQDLRPVQIRKI

SEQ ID NO: 3979 - protein, 17 aa, Artificial Sequence
  Non-cyclic GFR-binding peptide
  MOD_RES (2)..(2): Xaa is C or S
QXRPTQVQLEPLTVLYY

SEQ ID NO: 3980 - protein, 18 aa, Artificial Sequence
  Non-cyclic GFR-binding peptide
  MOD_RES (3)..(3): Xaa is C or S
VQXRPTQVQLEPLTVLYY

SEQ ID NO: 3981 - protein, 16 aa, Artificial Sequence
  Non-cyclic GFR-binding peptide
  MOD_RES (2)..(3): Xaa is C or S
PXXVSQDLSNITIQIM

SEQ ID NO: 3982 - protein, 11 aa, Artificial Sequence
  Non-cyclic GFR-binding peptide
TELRSVKMAKV

SEQ ID NO: 3983 - protein, 20 aa, Artificial Sequence
  Non-cyclic GFR-binding peptide
  MOD_RES (5)..(5): Xaa is C or S
RNVQXRPTQVQLEPLTVLYY

SEQ ID NO: 3984 - protein, 18 aa, Artificial Sequence
  Non-cyclic GFR-binding peptide
  MOD_RES (4)..(5): Xaa is C or S
AAPXXVPQALRPVQIRKI

SEQ ID NO: 3985 - protein, 14 aa, Artificial Sequence
  Non-cyclic GFR-binding peptide
  MOD_RES (1)..(1): Xaa is C or S
XAPTQLSNITVQIM

SEQ ID NO: 3986 - protein, 19 aa, Artificial Sequence
  Non-cyclic GFR-binding peptide
  MOD_RES (5)..(6): Xaa is C or S
SASPXXVPQDLSNITIQIM

SEQ ID NO: 3987 - protein, 17 aa, Artificial Sequence
  Non-cyclic GFR-binding peptide
  MOD_RES (3)..(4): Xaa is C or S
APXXVPQALRSVKIAKV

SEQ ID NO: 3988 - protein, 13 aa, Artificial Sequence
  Non-cyclic GFR-binding peptide
SRVHHEPLTVLYY

SEQ ID NO: 3989 - protein, 16 aa, Artificial Sequence
  Non-cyclic GFR-binding peptide
  MOD_RES (2)..(3): Xaa is C or S
AXXVPTELSNITMQIM

SEQ ID NO: 3990 - protein, 19 aa, Artificial Sequence
  Non-cyclic GFR-binding peptide
  MOD_RES (5)..(6): Xaa is C or S
VPKPXXAPTQLSNITVQIM

SEQ ID NO: 3991 - protein, 17 aa, Artificial Sequence
  Non-cyclic GFR-binding peptide
  MOD_RES (3)..(4): Xaa is C or S
SPXXVPQDLRSVKIAKV

SEQ ID NO: 3992 - protein, 11 aa, Artificial Sequence
  Non-cyclic GFR-binding peptide
TKLRSVKVAKV

SEQ ID NO: 3993 - protein, 17 aa, Artificial Sequence
  Non-cyclic GFR-binding peptide
  MOD_RES (3)..(4): Xaa is C or S
KAXXVPTELRSVKMAKV

SEQ ID NO: 3994 - protein, 20 aa, Artificial Sequence
  Non-cyclic GFR-binding peptide
  MOD_RES (6)..(7): Xaa is C or S
TVPKPXXAPTQLRPVQVRKI

SEQ ID NO: 3995 - protein, 12 aa, Artificial Sequence
  Non-cyclic GFR-binding peptide
PTEEEPLTMLYY

SEQ ID NO: 3996 - protein, 12 aa, Artificial Sequence
  Non-cyclic GFR-binding peptide
PQDLSNITIQIM

SEQ ID NO: 3997 - protein, 16 aa, Artificial Sequence
  Non-cyclic GFR-binding peptide
  MOD_RES (2)..(3): Xaa is C or S
PXXAPTKLSNITVQIM

SEQ ID NO: 3998 - protein, 19 aa, Artificial Sequence
  Non-cyclic GFR-binding peptide
  MOD_RES (5)..(6): Xaa is C or S
VPKPXXAPTQLRPVQVRKI

SEQ ID NO: 3999 - protein, 20 aa, Artificial Sequence
  Non-cyclic GFR-binding peptide
  MOD_RES (5)..(5): Xaa is C or S
SSVKXQPSRVHHEPLTVLYY

SEQ ID NO: 4000 - protein, 11 aa, Artificial Sequence
  Non-cyclic GFR-binding peptide
QALSNITIQIM

SEQ ID NO: 4001 - protein, 15 aa, Artificial Sequence
  Non-cyclic GFR-binding peptide
  MOD_RES (1)..(2): Xaa is C or S
XXAPTQLSNITVQIM

SEQ ID NO: 4002 - protein, 16 aa, Artificial Sequence
  Non-cyclic GFR-binding peptide
  MOD_RES (2)..(3): Xaa is C or S
PXXVSQDLRPVQIRKI

SEQ ID NO: 4003 - protein, 12 aa, Artificial Sequence
  Non-cyclic GFR-binding peptide
PQALRSVKIAKV

SEQ ID NO: 4004 - protein, 18 aa, Artificial Sequence
  Non-cyclic GFR-binding peptide
  MOD_RES (4)..(5): Xaa is C or S
AAPXXVPQALSNITIQIM

SEQ ID NO: 4005 - protein, 19 aa, Artificial Sequence
  Non-cyclic GFR-binding peptide
  MOD_RES (6)..(6): Xaa is C or S
VTKPTXAPTKLRSVKVAKV

SEQ ID NO: 4006 - protein, 13 aa, Artificial Sequence
  Non-cyclic GFR-binding peptide
VSQDLSNITIQIM

SEQ ID NO: 4007 - protein, 18 aa, Artificial Sequence
  Non-cyclic GFR-binding peptide
  MOD_RES (3)..(3): Xaa is C or S
VQXRPTQVQLEPLPVVYY

SEQ ID NO: 4008 - protein, 18 aa, Artificial Sequence
  Non-cyclic GFR-binding peptide
  MOD_RES (4)..(5): Xaa is C or S
ASPXXVSQDLRSVKIAKV

SEQ ID NO: 4009 - protein, 12 aa, Artificial Sequence
  Non-cyclic GFR-binding peptide
SQDLRPVQIRKI

SEQ ID NO: 4010 - protein, 19 aa, Artificial Sequence
  Non-cyclic GFR-binding peptide
  MOD_RES (4)..(4): Xaa is C or S
SVKXQPSRVHHEPLPVVYY

SEQ ID NO: 4011 - protein, 9 aa, Artificial Sequence
  Non-cyclic GFR-binding peptide
LRSVKIAKV

SEQ ID NO: 4012 - protein, 12 aa, Artificial Sequence
  Non-cyclic GFR-binding peptide
PTKLRPVQVRKI

SEQ ID NO: 4013 - protein, 14 aa, Artificial Sequence
  Non-cyclic GFR-binding peptide
  MOD_RES (1)..(1): Xaa is C or S
XAPTKLRSVKVAKV

SEQ ID NO: 4014 - protein, 18 aa, Artificial Sequence
  Non-cyclic GFR-binding peptide
  MOD_RES (4)..(5): Xaa is C or S
ASPXXVPQDLSNITIQIM

SEQ ID NO: 4015 - protein, 18 aa, Artificial Sequence
  Non-cyclic GFR-binding peptide
  MOD_RES (4)..(5): Xaa is C or S
PKPXXAPTKLRPVQVRKI

SEQ ID NO: 4016 - protein, 16 aa, Artificial Sequence
  Non-cyclic GFR-binding peptide
  MOD_RES (3)..(3): Xaa is C or S
PTXAPTKLSNITVQIM

SEQ ID NO: 4017 - protein, 9 aa, Artificial Sequence
  Non-cyclic GFR-binding peptide
LRPVQMRKI

SEQ ID NO: 4018 - protein, 12 aa, Artificial Sequence
  Non-cyclic GFR-binding peptide
PTEEEPLPMVYY

SEQ ID NO: 4019 - protein, 10 aa, Artificial Sequence
  Non-cyclic GFR-binding peptide
ELRSVKMAKV

SEQ ID NO: 4020 - protein, 9 aa, Artificial Sequence
  Non-cyclic GFR-binding peptide
EEPLTMLYY

SEQ ID NO: 4021 - protein, 12 aa, Artificial Sequence
  Non-cyclic GFR-binding peptide
PTQLRSVKVAKV

SEQ ID NO: 4022 - protein, 19 aa, Artificial Sequence
  Non-cyclic GFR-binding peptide
  MOD_RES (5)..(6): Xaa is C or S
IPKAXXVPTELSNITMQIM

SEQ ID NO: 4023 - protein, 13 aa, Artificial Sequence
  Non-cyclic GFR-binding peptide
VPQALRPVQIRKI

SEQ ID NO: 4024 - protein, 11 aa, Artificial Sequence
  Non-cyclic GFR-binding peptide
VHHEPLTVLYY

SEQ ID NO: 4025 - protein, 10 aa, Artificial Sequence
  Non-cyclic GFR-binding peptide
KLRSVKVAKV

SEQ ID NO: 4026 - protein, 19 aa, Artificial Sequence
  Non-cyclic GFR-binding peptide
  MOD_RES (5)..(6): Xaa is C or S
VPKPXXAPTKLSNITVQIM

SEQ ID NO: 4027 - protein, 16 aa, Artificial Sequence
  Non-cyclic GFR-binding peptide
  MOD_RES (2)..(3): Xaa is C or S
PXXVPQALSNITIQIM

SEQ ID NO: 4028 - protein, 18 aa, Artificial Sequence
  Non-cyclic GFR-binding peptide
  MOD_RES (4)..(5): Xaa is C or S
PKPXXAPTQLRSVKVAKV

SEQ ID NO: 4029 - protein, 16 aa, Artificial Sequence
  Non-cyclic GFR-binding peptide
  MOD_RES (2)..(3): Xaa is C or S
PXXVPQDLSNITIQIM

SEQ ID NO: 4030 - protein, 14 aa, Artificial Sequence
  Non-cyclic GFR-binding peptide
PSRVHHEPLPVVYY

SEQ ID NO: 4031 - protein, 17 aa, Artificial Sequence
  Non-cyclic GFR-binding peptide
  MOD_RES (4)..(4): Xaa is C or S
KPTXAPTKLSNITVQIM

SEQ ID NO: 4032 - protein, 20 aa, Artificial Sequence
  Non-cyclic GFR-binding peptide
  MOD_RES (6)..(7): Xaa is C or S
ASASPXXVSQDLSNITIQIM

SEQ ID NO: 4033 - protein, 20 aa, Artificial Sequence
  Non-cyclic GFR-binding peptide
  MOD_RES (7)..(7): Xaa is C or S
HVTKPTXAPTKLRPVQVRKI

SEQ ID NO: 4034 - protein, 16 aa, Artificial Sequence
  Non-cyclic GFR-binding peptide
  MOD_RES (2)..(3): Xaa is C or S
PXXAPTQLRPVQVRKI

SEQ ID NO: 4035 - protein, 15 aa, Artificial Sequence
  Non-cyclic GFR-binding peptide
  MOD_RES (1)..(2): Xaa is C or S
XXVSQDLSNITIQIM

SEQ ID NO: 4036 - protein, 16 aa, Artificial Sequence
  Non-cyclic GFR-binding peptide
  MOD_RES (3)..(3): Xaa is C or S
LEXVPTEEEPLPMVYY

SEQ ID NO: 4037 - protein, 17 aa, Artificial Sequence
  Non-cyclic GFR-binding peptide
  MOD_RES (2)..(2): Xaa is C or S
QXRPTQVQLEPLPVVYY

SEQ ID NO: 4038 - protein, 15 aa, Artificial Sequence
  Non-cyclic GFR-binding peptide
  MOD_RES (2)..(2): Xaa is C or S
TXAPTKLRPVQVRKI

SEQ ID NO: 4039 - protein, 14 aa, Artificial Sequence
  Non-cyclic GFR-binding peptide
  MOD_RES (1)..(1): Xaa is C or S
XVPQDLRSVKIAKV

SEQ ID NO: 4040 - protein, 13 aa, Artificial Sequence
  Non-cyclic GFR-binding peptide
VPQALSNITIQIM

SEQ ID NO: 4041 - protein, 10 aa, Artificial Sequence
  Non-cyclic GFR-binding peptide
EEEPLPMVYY

SEQ ID NO: 4042 - protein, 10 aa, Artificial Sequence
  Non-cyclic GFR-binding peptide
HHEPLPVVYY

SEQ ID NO: 4043 - protein, 14 aa, Artificial Sequence
  Non-cyclic GFR-binding peptide
  MOD_RES (1)..(1): Xaa is C or S
XAPTQLRPVQVRKI

SEQ ID NO: 4044 - protein, 19 aa, Artificial Sequence
  Non-cyclic GFR-binding peptide
  MOD_RES (5)..(6): Xaa is C or S
SAAPXXVPQALRPVQIRKI

SEQ ID NO: 4045 - protein, 18 aa, Artificial Sequence
  Non-cyclic GFR-binding peptide
  MOD_RES (5)..(5): Xaa is C or S
TKPTXAPTKLSNITVQIM

SEQ ID NO: 4046 - protein, 11 aa, Artificial Sequence
  Non-cyclic GFR-binding peptide
TQLRSVKVAKV

SEQ ID NO: 4047 - protein, 15 aa, Artificial Sequence
  Non-cyclic GFR-binding peptide
  MOD_RES (1)..(2): Xaa is C or S
XXVPQDLSNITIQIM

SEQ ID NO: 4048 - protein, 13 aa, Artificial Sequence
  Non-cyclic GFR-binding peptide
APTKLRPVQVRKI

SEQ ID NO: 4049 - protein, 11 aa, Artificial Sequence
  Non-cyclic GFR-binding peptide
TELRPVQMRKI

SEQ ID NO: 4050 - protein, 13 aa, Artificial Sequence
  Non-cyclic GFR-binding peptide
APTQLSNITVQIM

SEQ ID NO: 4051 - protein, 13 aa, Artificial Sequence
  Non-cyclic GFR-binding peptide
TQVQLEPLTVLYY

SEQ ID NO: 4052 - protein, 15 aa, Artificial Sequence
  Non-cyclic GFR-binding peptide
  MOD_RES (1)..(2): Xaa is C or S
XXVPTELRSVKMAKV

SEQ ID NO: 4053 - protein, 9 aa, Artificial Sequence
  Non-cyclic GFR-binding peptide
HEPLPVVYY

SEQ ID NO: 4054 - protein, 20 aa, Artificial Sequence
  Non-cyclic GFR-binding peptide
  MOD_RES (6)..(7): Xaa is C or S
SIPKAXXVPTELRPVQMRKI

SEQ ID NO: 4055 - protein, 17 aa, Artificial Sequence
  Non-cyclic GFR-binding peptide
  MOD_RES (4)..(4): Xaa is C or S
KPTXAPTKLRPVQVRKI

SEQ ID NO: 4056 - protein, 12 aa, Artificial Sequence
  Non-cyclic GFR-binding peptide
SQDLSNITIQIM

SEQ ID NO: 4057 - protein, 16 aa, Artificial Sequence
  Non-cyclic GFR-binding peptide
  MOD_RES (2)..(3): Xaa is C or S
AXXVPTELRPVQMRKI

SEQ ID NO: 4058 - protein, 14 aa, Artificial Sequence
  Non-cyclic GFR-binding peptide
PTQVQLEPLTVLYY

SEQ ID NO: 4059 - protein, 15 aa, Artificial Sequence
  Non-cyclic GFR-binding peptide
  MOD_RES (1)..(2): Xaa is C or S
XXAPTKLRPVQVRKI

SEQ ID NO: 4060 - protein, 10 aa, Artificial Sequence
  Non-cyclic GFR-binding peptide
ALSNITIQIM

SEQ ID NO: 4061 - protein, 19 aa, Artificial Sequence
  Non-cyclic GFR-binding peptide
  MOD_RES (4)..(4): Xaa is C or S
NVQXRPTQVQLEPLPVVYY

SEQ ID NO: 4062 - protein, 13 aa, Artificial Sequence
  Non-cyclic GFR-binding peptide
TQVQLEPLPVVYY

SEQ ID NO: 4063 - protein, 17 aa, Artificial Sequence
  Non-cyclic GFR-binding peptide
  MOD_RES (3)..(4): Xaa is C or S
KPXXAPTQLSNITVQIM

SEQ ID NO: 4064 - protein, 19 aa, Artificial Sequence
  Non-cyclic GFR-binding peptide
  MOD_RES (6)..(6): Xaa is C or S
VTKPTXAPTKLSNITVQIM

SEQ ID NO: 4065 - protein, 19 aa, Artificial Sequence
  Non-cyclic GFR-binding peptide
  MOD_RES (5)..(6): Xaa is C or S
VPKPXXAPTKLRSVKVAKV

SEQ ID NO: 4066 - protein, 20 aa, Artificial Sequence
  Non-cyclic GFR-binding peptide
  MOD_RES (6)..(7): Xaa is C or S
ASASPXXVSQDLRSVKIAKV

SEQ ID NO: 4067 - protein, 12 aa, Artificial Sequence
  Non-cyclic GFR-binding peptide
PQALRPVQIRKI

SEQ ID NO: 4068 - protein, 14 aa, Artificial Sequence
  Non-cyclic GFR-binding peptide
  MOD_RES (1)..(1): Xaa is C or S
XVPQALRPVQIRKI

SEQ ID NO: 4069 - protein, 18 aa, Artificial Sequence
  Non-cyclic GFR-binding peptide
  MOD_RES (4)..(5): Xaa is C or S
PKAXXVPTELRPVQMRKI

SEQ ID NO: 4070 - protein, 20 aa, Artificial Sequence
  Non-cyclic GFR-binding peptide
  MOD_RES (6)..(7): Xaa is C or S
KIPKAXXVPTELSNITMQIM

SEQ ID NO: 4071 - protein, 18 aa, Artificial Sequence
  Non-cyclic GFR-binding peptide
  MOD_RES (4)..(5): Xaa is C or S
ASPXXVSQDLRPVQIRKI

SEQ ID NO: 4072 - protein, 15 aa, Artificial Sequence
  Non-cyclic GFR-binding peptide
  MOD_RES (1)..(2): Xaa is C or S
XXAPTKLSNITVQIM

SEQ ID NO: 4073 - protein, 20 aa, Artificial Sequence
  Non-cyclic GFR-binding peptide
  MOD_RES (6)..(7): Xaa is C or S
ASASPXXVSQDLRPVQIRKI

SEQ ID NO: 4074 - protein, 13 aa, Artificial Sequence
  Non-cyclic GFR-binding peptide
VPQDLSNITIQIM

SEQ ID NO: 4075 - protein, 11 aa, Artificial Sequence
  Non-cyclic GFR-binding peptide
VQLEPLPVVYY

SEQ ID NO: 4076 - protein, 20 aa, Artificial Sequence
  Non-cyclic GFR-binding peptide
  MOD_RES (5)..(5): Xaa is C or S
RNVQXRPTQVQLEPLPVVYY

SEQ ID NO: 4077 - protein, 19 aa, Artificial Sequence
  Non-cyclic GFR-binding peptide
  MOD_RES (5)..(6): Xaa is C or S
VPKPXXAPTKLRPVQVRKI

SEQ ID NO: 4078 - protein, 17 aa, Artificial Sequence
  Non-cyclic GFR-binding peptide
  MOD_RES (4)..(4): Xaa is C or S
KPTXAPTKLRSVKVAKV

SEQ ID NO: 4079 - protein, 20 aa, Artificial Sequence
  Non-cyclic GFR-binding peptide
  MOD_RES (6)..(7): Xaa is C or S
TVPKPXXAPTQLRSVKVAKV

SEQ ID NO: 4080 - protein, 9 aa, Artificial Sequence
  Non-cyclic GFR-binding peptide
LSNITIQIM

SEQ ID NO: 4081 - protein, 18 aa, Artificial Sequence
  Non-cyclic GFR-binding peptide
  MOD_RES (4)..(5): Xaa is C or S
ASPXXVPQDLRSVKIAKV

SEQ ID NO: 4082 - protein, 12 aa, Artificial Sequence
  Non-cyclic GFR-binding peptide
PQDLRPVQIRKI

SEQ ID NO: 4083 - protein, 11 aa, Artificial Sequence
  Non-cyclic GFR-binding peptide
TKLRPVQVRKI

SEQ ID NO: 4084 - protein, 16 aa, Artificial Sequence
  Non-cyclic GFR-binding peptide
  MOD_RES (3)..(3): Xaa is C or S
LEXVPTEEEPLTMLYY

SEQ ID NO: 4085 - protein, 20 aa, Artificial Sequence
  Non-cyclic GFR-binding peptide
  MOD_RES (6)..(7): Xaa is C or S
KIPKAXXVPTELRPVQMRKI

SEQ ID NO: 4086 - protein, 18 aa, Artificial Sequence
  Non-cyclic GFR-binding peptide
  MOD_RES (4)..(5): Xaa is C or S
ASPXXVSQDLSNITIQIM

SEQ ID NO: 4087 - protein, 14 aa, Artificial Sequence
  Non-cyclic GFR-binding peptide
  MOD_RES (1)..(1): Xaa is C or S
XAPTQLRSVKVAKV

SEQ ID NO: 4088 - protein, 15 aa, Artificial Sequence
  Non-cyclic GFR-binding peptide
  MOD_RES (1)..(2): Xaa is C or S
XXVPQALSNITIQIM

SEQ ID NO: 4089 - protein, 14 aa, Artificial Sequence
  Non-cyclic GFR-binding peptide
  MOD_RES (1)..(1): Xaa is C or S
XVPQDLRPVQIRKI

SEQ ID NO: 4090 - protein, 18 aa, Artificial Sequence
  Non-cyclic GFR-binding peptide
  MOD_RES (4)..(5): Xaa is C or S
PKPXXAPTKLSNITVQIM

SEQ ID NO: 4091 - protein, 15 aa, Artificial Sequence
  Non-cyclic GFR-binding peptide
RPTQVQLEPLPVVYY

SEQ ID NO: 4092 - protein, 12 aa, Artificial Sequence
  Non-cyclic GFR-binding peptide
PQALSNITIQIM

SEQ ID NO: 4093 - protein, 18 aa, Artificial Sequence
  Non-cyclic GFR-binding peptide
  MOD_RES (4)..(5): Xaa is C or S
PKAXXVPTELRSVKMAKV

SEQ ID NO: 4094 - protein, 19 aa, Artificial Sequence
  Non-cyclic GFR-binding peptide
  MOD_RES (5)..(6): Xaa is C or S
SAAPXXVPQALRSVKIAKV

SEQ ID NO: 4095 - protein, 16 aa, Artificial Sequence
  Non-cyclic GFR-binding peptide
  MOD_RES (1)..(1): Xaa is C or S
XRPTQVQLEPLTVLYY

SEQ ID NO: 4096 - protein, 14 aa, Artificial Sequence
  Non-cyclic GFR-binding peptide
  MOD_RES (1)..(1): Xaa is C or S
XVSQDLSNITIQIM

SEQ ID NO: 4097 - protein, 15 aa, Artificial Sequence
  Non-cyclic GFR-binding peptide
  MOD_RES (2)..(2): Xaa is C or S
EXVPTEEEPLPMVYY

SEQ ID NO: 4098 - protein, 17 aa, Artificial Sequence
  Non-cyclic GFR-binding peptide
  MOD_RES (3)..(4): Xaa is C or S
KAXXVPTELRPVQMRKI

SEQ ID NO: 4099 - protein, 18 aa, Artificial Sequence
  Non-cyclic GFR-binding peptide
  MOD_RES (4)..(5): Xaa is C or S
PKPXXAPTQLRPVQVRKI

SEQ ID NO: 4100 - protein, 17 aa, Artificial Sequence
  Non-cyclic GFR-binding peptide
  MOD_RES (2)..(2): Xaa is C or S
KXQPSRVHHEPLTVLYY

SEQ ID NO: 4101 - protein, 15 aa, Artificial Sequence
  Non-cyclic GFR-binding peptide
  MOD_RES (1)..(2): Xaa is C or S
XXAPTQLRPVQVRKI

SEQ ID NO: 4102 - protein, 10 aa, Artificial Sequence
  Non-cyclic GFR-binding peptide
EEEPLTMLYY

SEQ ID NO: 4103 - protein, 9 aa, Artificial Sequence
  Non-cyclic GFR-binding peptide
HEPLTVLYY

SEQ ID NO: 4104 - protein, 13 aa, Artificial Sequence
  Non-cyclic GFR-binding peptide
VPTELRSVKMAKV

SEQ ID NO: 4105 - protein, 17 aa, Artificial Sequence
  Non-cyclic GFR-binding peptide
  MOD_RES (3)..(4): Xaa is C or S
KPXXAPTKLSNITVQIM

SEQ ID NO: 4106 - protein, 10 aa, Artificial Sequence
  Non-cyclic GFR-binding peptide
DLSNITIQIM

SEQ ID NO: 4107 - protein, 19 aa, Artificial Sequence
  Non-cyclic GFR-binding peptide
  MOD_RES (4)..(4): Xaa is C or S
SVKXQPSRVHHEPLTVLYY

SEQ ID NO: 4108 - protein, 20 aa, Artificial Sequence
  Non-cyclic GFR-binding peptide
  MOD_RES (6)..(7): Xaa is C or S
SIPKAXXVPTELRSVKMAKV

SEQ ID NO: 4109 - protein, 16 aa, Artificial Sequence
  Non-cyclic GFR-binding peptide
  MOD_RES (2)..(3): Xaa is C or S
PXXAPTQLSNITVQIM

SEQ ID NO: 4110 - protein, 20 aa, Artificial Sequence
  Non-cyclic GFR-binding peptide
  MOD_RES (7)..(7): Xaa is C or S
HVTKPTXAPTKLSNITVQIM

SEQ ID NO: 4111 - protein, 19 aa, Artificial Sequence
  Non-cyclic GFR-binding peptide
  MOD_RES (4)..(4): Xaa is C or S
NVQXRPTQVQLEPLTVLYY

SEQ ID NO: 4112 - protein, 14 aa, Artificial Sequence
  Non-cyclic GFR-binding peptide
  MOD_RES (1)..(1): Xaa is C or S
XAPTKLRPVQVRKI

SEQ ID NO: 4113 - protein, 16 aa, Artificial Sequence
  Non-cyclic GFR-binding peptide
  MOD_RES (14)..(15): Xaa is C or S
FYLMSIANMKTPTXXP

SEQ ID NO: 4114 - protein, 9 aa, Artificial Sequence
  Non-cyclic GFR-binding peptide
FYLMSIANT

SEQ ID NO: 4115 - protein, 15 aa, Artificial Sequence
  Non-cyclic GFR-binding peptide
  MOD_RES (14)..(15): Xaa is C or S
FYLMSIANTKVPAXX

SEQ ID NO: 4116 - protein, 9 aa, Artificial Sequence
  Non-cyclic GFR-binding peptide
FYLMSIANM

SEQ ID NO: 4117 - protein, 15 aa, Artificial Sequence
  Non-cyclic GFR-binding peptide
  MOD_RES (14)..(15): Xaa is C or S
FYLMSIANMKTPTXX

SEQ ID NO: 4118 - protein, 11 aa, Artificial Sequence
  Non-cyclic GFR-binding peptide
FYLMSIANMKT

SEQ ID NO: 4119 - protein, 17 aa, Artificial Sequence
  Non-cyclic GFR-binding peptide
  MOD_RES (14)..(15): Xaa is C or S
FYLMSIANMKTPTXXPG

SEQ ID NO: 4120 - protein, 18 aa, Artificial Sequence
  Non-cyclic GFR-binding peptide
  MOD_RES (14)..(15): Xaa is C or S
FYLMSIANMKTPTXXPGA

SEQ ID NO: 4121 - protein, 19 aa, Artificial Sequence
  Non-cyclic GFR-binding peptide
  MOD_RES (14)..(15): Xaa is C or S
FYLMSIANMKTPTXXPGAS

SEQ ID NO: 4122 - protein, 20 aa, Artificial Sequence
  Non-cyclic GFR-binding peptide
  MOD_RES (14)..(15): Xaa is C or S
FYLMSIANMKTPTXXPGASG

SEQ ID NO: 4123 - protein, 10 aa, Artificial Sequence
  Non-cyclic GFR-binding peptide
FYLMSIANMK

SEQ ID NO: 4124 - protein, 10 aa, Artificial Sequence
  Non-cyclic GFR-binding peptide
FYLMSIANTK

SEQ ID NO: 4125 - protein, 18 aa, Artificial Sequence
  Non-cyclic GFR-binding peptide
  MOD_RES (14)..(15): Xaa is C or S
FYLMSIANTKVPAXXTSP

SEQ ID NO: 4126 - protein, 13 aa, Artificial Sequence
  Non-cyclic GFR-binding peptide
FYLMSIANMKTPT

SEQ ID NO: 4127 - protein, 20 aa, Artificial Sequence
  Non-cyclic GFR-binding peptide
  MOD_RES (14)..(15): Xaa is C or S
FYLMSIANTKVPAXXTSPVR

SEQ ID NO: 4128 - protein, 16 aa, Artificial Sequence
  Non-cyclic GFR-binding peptide
  MOD_RES (14)..(15): Xaa is C or S
FYLMSIANTKVPAXXT

SEQ ID NO: 4129 - protein, 14 aa, Artificial Sequence
  Non-cyclic GFR-binding peptide
  MOD_RES (14)..(14): Xaa is C or S
FYLMSIANTKVPAX

SEQ ID NO: 4130 - protein, 12 aa, Artificial Sequence
  Non-cyclic GFR-binding peptide
FYLMSIANTKVP

SEQ ID NO: 4131 - protein, 14 aa, Artificial Sequence
  Non-cyclic GFR-binding peptide
  MOD_RES (14)..(14): Xaa is C or S
FYLMSIANMKTPTX

SEQ ID NO: 4132 - protein, 13 aa, Artificial Sequence
  Non-cyclic GFR-binding peptide
FYLMSIANTKVPA

SEQ ID NO: 4133 - protein, 19 aa, Artificial Sequence
  Non-cyclic GFR-binding peptide
  MOD_RES (14)..(15): Xaa is C or S
FYLMSIANTKVPAXXTSPV

SEQ ID NO: 4134 - protein, 11 aa, Artificial Sequence
  Non-cyclic GFR-binding peptide
FYLMSIANTKV

SEQ ID NO: 4135 - protein, 12 aa, Artificial Sequence
  Non-cyclic GFR-binding peptide
FYLMSIANMKTP

SEQ ID NO: 4136 - protein, 17 aa, Artificial Sequence
  Non-cyclic GFR-binding peptide
  MOD_RES (14)..(15): Xaa is C or S
FYLMSIANTKVPAXXTS

SEQ ID NO: 4137 - protein, 16 aa, Artificial Sequence
  Non-cyclic GFR-binding peptide
  MOD_RES (2)..(3): Xaa is C or S
PXXTPTKMNAISMLYF

SEQ ID NO: 4138 - protein, 9 aa, Artificial Sequence
  Non-cyclic GFR-binding peptide
TNAISMLYF

SEQ ID NO: 4139 - protein, 15 aa, Artificial Sequence
  Non-cyclic GFR-binding peptide
  MOD_RES (1)..(2): Xaa is C or S
XXAPVKTNAISMLYF

SEQ ID NO: 4140 - protein, 9 aa, Artificial Sequence
  Non-cyclic GFR-binding peptide
MNAISMLYF

SEQ ID NO: 4141 - protein, 15 aa, Artificial Sequence
  Non-cyclic GFR-binding peptide
  MOD_RES (1)..(2): Xaa is C or S
XXTPTKMNAISMLYF

SEQ ID NO: 4142 - protein, 11 aa, Artificial Sequence
  Non-cyclic GFR-binding peptide
TKMNAISMLYF

SEQ ID NO: 4143 - protein, 17 aa, Artificial Sequence
  Non-cyclic GFR-binding peptide
  MOD_RES (3)..(4): Xaa is C or S
GPXXTPTKMNAISMLYF

SEQ ID NO: 4144 - protein, 18 aa, Artificial Sequence
  Non-cyclic GFR-binding peptide
  MOD_RES (4)..(5): Xaa is C or S
AGPXXTPTKMNAISMLYF

SEQ ID NO: 4145 - protein, 19 aa, Artificial Sequence
  Non-cyclic GFR-binding peptide
  MOD_RES (5)..(6): Xaa is C or S
SAGPXXTPTKMNAISMLYF

SEQ ID NO: 4146 - protein, 20 aa, Artificial Sequence
  Non-cyclic GFR-binding peptide
  MOD_RES (6)..(7): Xaa is C or S
GSAGPXXTPTKMNAISMLYF

SEQ ID NO: 4147 - protein, 10 aa, Artificial Sequence
  Non-cyclic GFR-binding peptide
KMNAISMLYF

SEQ ID NO: 4148 - protein, 10 aa, Artificial Sequence
  Non-cyclic GFR-binding peptide
KTNAISMLYF

SEQ ID NO: 4149 - protein, 18 aa, Artificial Sequence
  Non-cyclic GFR-binding peptide
  MOD_RES (4)..(5): Xaa is C or S
PSTXXAPVKTNAISMLYF

SEQ ID NO: 4150 - protein, 13 aa, Artificial Sequence
  Non-cyclic GFR-binding peptide
TPTKMNAISMLYF

SEQ ID NO: 4151 - protein, 20 aa, Artificial Sequence
  Non-cyclic GFR-binding peptide
  MOD_RES (6)..(7): Xaa is C or S
RVPSTXXAPVKTNAISMLYF

SEQ ID NO: 4152 - protein, 16 aa, Artificial Sequence
  Non-cyclic GFR-binding peptide
  MOD_RES (2)..(3): Xaa is C or S
TXXAPVKTNAISMLYF

SEQ ID NO: 4153 - protein, 14 aa, Artificial Sequence
  Non-cyclic GFR-binding peptide
  MOD_RES (1)..(1): Xaa is C or S
XAPVKTNAISMLYF

SEQ ID NO: 4154 - protein, 12 aa, Artificial Sequence
  Non-cyclic GFR-binding peptide
PVKTNAISMLYF

SEQ ID NO: 4155 - protein, 14 aa, Artificial Sequence
  Non-cyclic GFR-binding peptide
  MOD_RES (1)..(1): Xaa is C or S
XTPTKMNAISMLYF

SEQ ID NO: 4156 - protein, 13 aa, Artificial Sequence
  Non-cyclic GFR-binding peptide
APVKTNAISMLYF

SEQ ID NO: 4157 - protein, 19 aa, Artificial Sequence
  Non-cyclic GFR-binding peptide
  MOD_RES (5)..(6): Xaa is C or S
VPSTXXAPVKTNAISMLYF

SEQ ID NO: 4158 - protein, 11 aa, Artificial Sequence
  Non-cyclic GFR-binding peptide
VKTNAISMLYF

SEQ ID NO: 4159 - protein, 12 aa, Artificial Sequence
  Non-cyclic GFR-binding peptide
PTKMNAISMLYF

SEQ ID NO: 4160 - protein, 17 aa, Artificial Sequence
  Non-cyclic GFR-binding peptide
  MOD_RES (3)..(4): Xaa is C or S
STXXAPVKTNAISMLYF

SEQ ID NO: 4161 - protein, 13 aa, Artificial Sequence
  Non-cyclic GFR-binding peptide
YYLISTASLRTPV

SEQ ID NO: 4162 - protein, 14 aa, Artificial Sequence
  Non-cyclic GFR-binding peptide
  MOD_RES (14)..(14): Xaa is C or S
YYLISTASMKEPVX

SEQ ID NO: 4163 - protein, 18 aa, Artificial Sequence
  Non-cyclic GFR-binding peptide
  MOD_RES (14)..(15): Xaa is C or S
FYLINIPSMKEPVXXPEP

SEQ ID NO: 4164 - protein, 20 aa, Artificial Sequence
  Non-cyclic GFR-binding peptide
  MOD_RES (14)..(15): Xaa is C or S
KYLMSIPSMKTPTXXPGASG

SEQ ID NO: 4165 - protein, 11 aa, Artificial Sequence
  Non-cyclic GFR-binding peptide
KYLMSIPSMKT

SEQ ID NO: 4166 - protein, 9 aa, Artificial Sequence
  Non-cyclic GFR-binding peptide
KYLISIPSM

SEQ ID NO: 4167 - protein, 11 aa, Artificial Sequence
  Non-cyclic GFR-binding peptide
LYLISIPELRT

SEQ ID NO: 4168 - protein, 19 aa, Artificial Sequence
  Non-cyclic GFR-binding peptide
  MOD_RES (14)..(15): Xaa is C or S
YYLMSTASTKVPAXXTSPV

SEQ ID NO: 4169 - protein, 16 aa, Artificial Sequence
  Non-cyclic GFR-binding peptide
  MOD_RES (14)..(15): Xaa is C or S
KYLISIPSMKEPVXXP

SEQ ID NO: 4170 - protein, 12 aa, Artificial Sequence
  Non-cyclic GFR-binding peptide
LYLMSIPEMKTP

SEQ ID NO: 4171 - protein, 15 aa, Artificial Sequence
  Non-cyclic GFR-binding peptide
  MOD_RES (14)..(15): Xaa is C or S
YYLISTASLRAPVXX

SEQ ID NO: 4172 - protein, 14 aa, Artificial Sequence
  Non-cyclic GFR-binding peptide
  MOD_RES (14)..(14): Xaa is C or S
YYLISTASLRAPVX

SEQ ID NO: 4173 - protein, 14 aa, Artificial Sequence
  Non-cyclic GFR-binding peptide
  MOD_RES (14)..(14): Xaa is C or S
FYLINIPSLDQPVX

SEQ ID NO: 4174 - protein, 17 aa, Artificial Sequence
  Non-cyclic GFR-binding peptide
  MOD_RES (14)..(15): Xaa is C or S
FYLINIPSLAQPVXXPA

SEQ ID NO: 4175 - protein, 9 aa, Artificial Sequence
  Non-cyclic GFR-binding peptide
FYLISIANM

SEQ ID NO: 4176 - protein, 17 aa, Artificial Sequence
  Non-cyclic GFR-binding peptide
  MOD_RES (14)..(15): Xaa is C or S
YYLMSTASMKTPTXXPG

SEQ ID NO: 4177 - protein, 17 aa, Artificial Sequence
  Non-cyclic GFR-binding peptide
  MOD_RES (14)..(15): Xaa is C or S
FYLINIPSLDQPVXXPS

SEQ ID NO: 4178 - protein, 15 aa, Artificial Sequence
  Non-cyclic GFR-binding peptide
  MOD_RES (14)..(15): Xaa is C or S
LYLMSIPEMKTPTXX

SEQ ID NO: 4179 - protein, 13 aa, Artificial Sequence
  Non-cyclic GFR-binding peptide
LYLMSIPEMKTPT

SEQ ID NO: 4180 - protein, 20 aa, Artificial Sequence
  Non-cyclic GFR-binding peptide
  MOD_RES (14)..(15): Xaa is C or S
KYLVSIPSLKTPAXXPKPVH

SEQ ID NO: 4181 - protein, 15 aa, Artificial Sequence
  Non-cyclic GFR-binding peptide
  MOD_RES (14)..(15): Xaa is C or S
YYLMSTASTKVPAXX

SEQ ID NO: 4182 - protein, 19 aa, Artificial Sequence
  Non-cyclic GFR-binding peptide
  MOD_RES (14)..(15): Xaa is C or S
FYLINIPSLDQPVXXPSAS

SEQ ID NO: 4183 - protein, 20 aa, Artificial Sequence
  Non-cyclic GFR-binding peptide
  MOD_RES (14)..(15): Xaa is C or S
YYLISTASMKEPVXXPEPIG

SEQ ID NO: 4184 - protein, 10 aa, Artificial Sequence
  Non-cyclic GFR-binding peptide
LYLMSIPETK

SEQ ID NO: 4185 - protein, 14 aa, Artificial Sequence
  Non-cyclic GFR-binding peptide
  MOD_RES (14)..(14): Xaa is C or S
FYLINIPSLAQPVX

SEQ ID NO: 4186 - protein, 10 aa, Artificial Sequence
  Non-cyclic GFR-binding peptide
KYLMSIPSTK

SEQ ID NO: 4187 - protein, 17 aa, Artificial Sequence
  Non-cyclic GFR-binding peptide
  MOD_RES (14)..(15): Xaa is C or S
YYLISTASLRTPVXXTP

SEQ ID NO: 4188 - protein, 18 aa, Artificial Sequence
  Non-cyclic GFR-binding peptide
  MOD_RES (14)..(15): Xaa is C or S
LYLMSIPETKVPAXXTSP

SEQ ID NO: 4189 - protein, 20 aa, Artificial Sequence
  Non-cyclic GFR-binding peptide
  MOD_RES (14)..(15): Xaa is C or S
YYLISTASLRAPVXXSAPAA

SEQ ID NO: 4190 - protein, 18 aa, Artificial Sequence
  Non-cyclic GFR-binding peptide
  MOD_RES (14)..(15): Xaa is C or S
FYLINIPSLDQSVXXPSA

SEQ ID NO: 4191 - protein, 18 aa, Artificial Sequence
  Non-cyclic GFR-binding peptide
  MOD_RES (14)..(15): Xaa is C or S
KYLISIPSLRTPVXXTPP

SEQ ID NO: 4192 - protein, 12 aa, Artificial Sequence
  Non-cyclic GFR-binding peptide
LYLMSIPETKVP

SEQ ID NO: 4193 - protein, 16 aa, Artificial Sequence
  Non-cyclic GFR-binding peptide
  MOD_RES (14)..(15): Xaa is C or S
KYLMSIPSMKTPTXXP

SEQ ID NO: 4194 - protein, 12 aa, Artificial Sequence
  Non-cyclic GFR-binding peptide
FYLINIPSLDQP

SEQ ID NO: 4195 - protein, 14 aa, Artificial Sequence
  Non-cyclic GFR-binding peptide
  MOD_RES (14)..(14): Xaa is C or S
YYLISTASLRTPVX

SEQ ID NO: 4196 - protein, 13 aa, Artificial Sequence
  Non-cyclic GFR-binding peptide
YYLMSTASTKVPA

SEQ ID NO: 4197 - protein, 12 aa, Artificial Sequence
  Non-cyclic GFR-binding peptide
YYLISTASLRTP

SEQ ID NO: 4198 - protein, 14 aa, Artificial Sequence
  Non-cyclic GFR-binding peptide
  MOD_RES (14)..(14): Xaa is C or S
LYLMSIPEMKTPTX

SEQ ID NO: 4199 - protein, 18 aa, Artificial Sequence
  Non-cyclic GFR-binding peptide
  MOD_RES (14)..(15): Xaa is C or S
YYLISTASLKTPVXXAKS

SEQ ID NO: 4200 - protein, 16 aa, Artificial Sequence
  Non-cyclic GFR-binding peptide
  MOD_RES (14)..(15): Xaa is C or S
FYLISIANMKEPVXXP

SEQ ID NO: 4201 - protein, 20 aa, Artificial Sequence
  Non-cyclic GFR-binding peptide
  MOD_RES (14)..(15): Xaa is C or S
KYLISIPSLRTPVXXTPPTS

SEQ ID NO: 4202 - protein, 15 aa, Artificial Sequence
  Non-cyclic GFR-binding peptide
  MOD_RES (14)..(15): Xaa is C or S
YYLISTASLRTPVXX

SEQ ID NO: 4203 - protein, 14 aa, Artificial Sequence
  Non-cyclic GFR-binding peptide
  MOD_RES (14)..(14): Xaa is C or S
FYLINIPSLDQSVX

SEQ ID NO: 4204 - protein, 10 aa, Artificial Sequence
  Non-cyclic GFR-binding peptide
YYLMSTASMK

SEQ ID NO: 4205 - protein, 17 aa, Artificial Sequence
  Non-cyclic GFR-binding peptide
  MOD_RES (14)..(15): Xaa is C or S
FYLISIANMKEPVXXPE

SEQ ID NO: 4206 - protein, 14 aa, Artificial Sequence
  Non-cyclic GFR-binding peptide
  MOD_RES (14)..(14): Xaa is C or S
YYLMSTASTKVPAX

SEQ ID NO: 4207 - protein, 16 aa, Artificial Sequence
  Non-cyclic GFR-binding peptide
  MOD_RES (14)..(15): Xaa is C or S
LYLMSIPETKVPAXXT

SEQ ID NO: 4208 - protein, 15 aa, Artificial Sequence
  Non-cyclic GFR-binding peptide
  MOD_RES (14)..(15): Xaa is C or S
FYLINIPSLDQPVXX

SEQ ID NO: 4209 - protein, 19 aa, Artificial Sequence
  Non-cyclic GFR-binding peptide
  MOD_RES (14)..(15): Xaa is C or S
KYLISIPSMKEPVXXPEPI

SEQ ID NO: 4210 - protein, 19 aa, Artificial Sequence
  Non-cyclic GFR-binding peptide
  MOD_RES (14)..(15): Xaa is C or S
YYLISTASLRTPVXXTPPT

SEQ ID NO: 4211 - protein, 20 aa, Artificial Sequence
  Non-cyclic GFR-binding peptide
  MOD_RES (14)..(15): Xaa is C or S
YYLMSTASTKVPAXXTSPVR

SEQ ID NO: 4212 - protein, 11 aa, Artificial Sequence
  Non-cyclic GFR-binding peptide
LYLISIPEMKE

SEQ ID NO: 4213 - protein, 17 aa, Artificial Sequence
  Non-cyclic GFR-binding peptide
  MOD_RES (14)..(15): Xaa is C or S
YYLISTASLRAPVXXSA

SEQ ID NO: 4214 - protein, 18 aa, Artificial Sequence
  Non-cyclic GFR-binding peptide
  MOD_RES (14)..(15): Xaa is C or S
LYLISIPEMKEPVXXPEP

SEQ ID NO: 4215 - protein, 16 aa, Artificial Sequence
  Non-cyclic GFR-binding peptide
  MOD_RES (14)..(15): Xaa is C or S
YYLMSTASMKTPTXXP

SEQ ID NO: 4216 - protein, 16 aa, Artificial Sequence
  Non-cyclic GFR-binding peptide
  MOD_RES (14)..(15): Xaa is C or S
LYLISIPELRTPVXXT

SEQ ID NO: 4217 - protein, 13 aa, Artificial Sequence
  Non-cyclic GFR-binding peptide
FYLINIPSLDQPV

SEQ ID NO: 4218 - protein, 10 aa, Artificial Sequence
  Non-cyclic GFR-binding peptide
FYLINIPSLD

SEQ ID NO: 4219 - protein, 12 aa, Artificial Sequence
  Non-cyclic GFR-binding peptide
KYLMSIPSMKTP

SEQ ID NO: 4220 - protein, 10 aa, Artificial Sequence
  Non-cyclic GFR-binding peptide
FYLISIANMK

SEQ ID NO: 4221 - protein, 19 aa, Artificial Sequence
  Non-cyclic GFR-binding peptide
  MOD_RES (14)..(15): Xaa is C or S
FYLINIPSLDQSVXXPSAS

SEQ ID NO: 4222 - protein, 12 aa, Artificial Sequence
  Non-cyclic GFR-binding peptide
LYLISIPELRTP

SEQ ID NO: 4223 - protein, 14 aa, Artificial Sequence
  Non-cyclic GFR-binding peptide
  MOD_RES (14)..(14): Xaa is C or S
KYLISIPSLRTPVX

SEQ ID NO: 4224 - protein, 15 aa, Artificial Sequence
  Non-cyclic GFR-binding peptide
  MOD_RES (14)..(15): Xaa is C or S
LYLISIPEMKEPVXX

SEQ ID NO: 4225 - protein, 20 aa, Artificial Sequence
  Non-cyclic GFR-binding peptide
  MOD_RES (14)..(15): Xaa is C or S
FYLISIANMKEPVXXPEPIG

SEQ ID NO: 4226 - protein, 17 aa, Artificial Sequence
  Non-cyclic GFR-binding peptide
  MOD_RES (14)..(15): Xaa is C or S
KYLISIPSMKEPVXXPE

SEQ ID NO: 4227 - protein, 9 aa, Artificial Sequence
  Non-cyclic GFR-binding peptide
LYLISIPEM

SEQ ID NO: 4228 - protein, 16 aa, Artificial Sequence
  Non-cyclic GFR-binding peptide
  MOD_RES (14)..(15): Xaa is C or S
YYLISTASLRTPVXXT

SEQ ID NO: 4229 - protein, 10 aa, Artificial Sequence
  Non-cyclic GFR-binding peptide
FYLINIPSLA

SEQ ID NO: 4230 - protein, 13 aa, Artificial Sequence
  Non-cyclic GFR-binding peptide
FYLINIPSLAQPV

SEQ ID NO: 4231 - protein, 11 aa, Artificial Sequence
  Non-cyclic GFR-binding peptide
FYLISIANMKE

SEQ ID NO: 4232 - protein, 12 aa, Artificial Sequence
  Non-cyclic GFR-binding peptide
YYLMSTASTKVP

SEQ ID NO: 4233 - protein, 17 aa, Artificial Sequence
  Non-cyclic GFR-binding peptide
  MOD_RES (14)..(15): Xaa is C or S
LYLISIPELRTPVXXTP

SEQ ID NO: 4234 - protein, 9 aa, Artificial Sequence
  Non-cyclic GFR-binding peptide
LYLMSIPET

SEQ ID NO: 4235 - protein, 13 aa, Artificial Sequence
  Non-cyclic GFR-binding peptide
KYLMSIPSMKTPT

SEQ ID NO: 4236 - protein, 13 aa, Artificial Sequence
  Non-cyclic GFR-binding peptide
YYLMSTASMKTPT

SEQ ID NO: 4237 - protein, 20 aa, Artificial Sequence
  Non-cyclic GFR-binding peptide
  MOD_RES (14)..(15): Xaa is C or S
LYLISIPELRTPVXXTPPTS

SEQ ID NO: 4238 - protein, 10 aa, Artificial Sequence
  Non-cyclic GFR-binding peptide
KYLISIPSMK

SEQ ID NO: 4239 - protein, 13 aa, Artificial Sequence
  Non-cyclic GFR-binding peptide
FYLINIPSLDQSV

SEQ ID NO: 4240 - protein, 12 aa, Artificial Sequence
  Non-cyclic GFR-binding peptide
YYLISTASLRAP

SEQ ID NO: 4241 - protein, 17 aa, Artificial Sequence
  Non-cyclic GFR-binding peptide
  MOD_RES (14)..(15): Xaa is C or S
LYLMSIPEMKTPTXXPG

SEQ ID NO: 4242 - protein, 18 aa, Artificial Sequence
  Non-cyclic GFR-binding peptide
  MOD_RES (14)..(15): Xaa is C or S
YYLMSTASMKTPTXXPGA

SEQ ID NO: 4243 - protein, 19 aa, Artificial Sequence
  Non-cyclic GFR-binding peptide
  MOD_RES (14)..(15): Xaa is C or S
KYLMSIPSTKVPAXXTSPV

SEQ ID NO: 4244 - protein, 16 aa, Artificial Sequence
  Non-cyclic GFR-binding peptide
  MOD_RES (14)..(15): Xaa is C or S
YYLISTASLRAPVXXS

SEQ ID NO: 4245 - protein, 19 aa, Artificial Sequence
  Non-cyclic GFR-binding peptide
  MOD_RES (14)..(15): Xaa is C or S
FYLISIANMKEPVXXPEPI

SEQ ID NO: 4246 - protein, 20 aa, Artificial Sequence
  Non-cyclic GFR-binding peptide
  MOD_RES (14)..(15): Xaa is C or S
LYLVSIPELKTPAXXPKPVH

SEQ ID NO: 4247 - protein, 18 aa, Artificial Sequence
  Non-cyclic GFR-binding peptide
  MOD_RES (14)..(15): Xaa is C or S
KYLISIPSMKEPVXXPEP

SEQ ID NO: 4248 - protein, 14 aa, Artificial Sequence
  Non-cyclic GFR-binding peptide
  MOD_RES (14)..(14): Xaa is C or S
YYLISTASLKTPVX

SEQ ID NO: 4249 - protein, 13 aa, Artificial Sequence
  Non-cyclic GFR-binding peptide
FYLINIPSMKEPV

SEQ ID NO: 4250 - protein, 10 aa, Artificial Sequence
  Non-cyclic GFR-binding peptide
YYLISTASMK

SEQ ID NO: 4251 - protein, 12 aa, Artificial Sequence
  Non-cyclic GFR-binding peptide
KYLMSIPSTKVP

SEQ ID NO: 4252 - protein, 14 aa, Artificial Sequence
  Non-cyclic GFR-binding peptide
  MOD_RES (14)..(14): Xaa is C or S
LYLISIPEMKEPVX

SEQ ID NO: 4253 - protein, 17 aa, Artificial Sequence
  Non-cyclic GFR-binding peptide
  MOD_RES (14)..(15): Xaa is C or S
YYLISTASMKEPVXXPE

SEQ ID NO: 4254 - protein, 14 aa, Artificial Sequence
  Non-cyclic GFR-binding peptide
  MOD_RES (14)..(14): Xaa is C or S
FYLISIANMKEPVX

SEQ ID NO: 4255 - protein, 17 aa, Artificial Sequence
  Non-cyclic GFR-binding peptide
  MOD_RES (14)..(15): Xaa is C or S
YYLISTASLKTPVXXAK

SEQ ID NO: 4256 - protein, 11 aa, Artificial Sequence
  Non-cyclic GFR-binding peptide
KYLISIPSMKE

SEQ ID NO: 4257 - protein, 13 aa, Artificial Sequence
  Non-cyclic GFR-binding peptide
YYLISTASLRAPV

SEQ ID NO: 4258 - protein, 11 aa, Artificial Sequence
  Non-cyclic GFR-binding peptide
YYLISTASLKT

SEQ ID NO: 4259 - protein, 19 aa, Artificial Sequence
  Non-cyclic GFR-binding peptide
  MOD_RES (14)..(15): Xaa is C or S
LYLISIPEMKEPVXXPEPI

SEQ ID NO: 4260 - protein, 11 aa, Artificial Sequence
  Non-cyclic GFR-binding peptide
LYLMSIPETKV

SEQ ID NO: 4261 - protein, 16 aa, Artificial Sequence
  Non-cyclic GFR-binding peptide
  MOD_RES (14)..(15): Xaa is C or S
KYLISIPSLRTPVXXT

SEQ ID NO: 4262 - protein, 15 aa, Artificial Sequence
  Non-cyclic GFR-binding peptide
  MOD_RES (14)..(15): Xaa is C or S
YYLISTASMKEPVXX

SEQ ID NO: 4263 - protein, 11 aa, Artificial Sequence
  Non-cyclic GFR-binding peptide
YYLISTASMKE

SEQ ID NO: 4264 - protein, 19 aa, Artificial Sequence
  Non-cyclic GFR-binding peptide
  MOD_RES (14)..(15): Xaa is C or S
LYLISIPELRTPVXXTPPT

SEQ ID NO: 4265 - protein, 18 aa, Artificial Sequence
  Non-cyclic GFR-binding peptide
  MOD_RES (14)..(15): Xaa is C or S
KYLMSIPSMKTPTXXPGA

SEQ ID NO: 4266 - protein, 14 aa, Artificial Sequence
  Non-cyclic GFR-binding peptide
  MOD_RES (14)..(14): Xaa is C or S
LYLMSIPETKVPAX

SEQ ID NO: 4267 - protein, 18 aa, Artificial Sequence
  Non-cyclic GFR-binding peptide
  MOD_RES (14)..(15): Xaa is C or S
LYLISIPELRTPVXXTPP

SEQ ID NO: 4268 - protein, 15 aa, Artificial Sequence
  Non-cyclic GFR-binding peptide
  MOD_RES (14)..(15): Xaa is C or S
LYLMSIPETKVPAXX

SEQ ID NO: 4269 - protein, 16 aa, Artificial Sequence
  Non-cyclic GFR-binding peptide
  MOD_RES (14)..(15): Xaa is C or S
YYLISTASMKEPVXXP

SEQ ID NO: 4270 - protein, 15 aa, Artificial Sequence
  Non-cyclic GFR-binding peptide
  MOD_RES (14)..(15): Xaa is C or S
YYLISTASLKTPVXX

SEQ ID NO: 4271 - protein, 13 aa, Artificial Sequence
  Non-cyclic GFR-binding peptide
LYLISIPELRTPV

SEQ ID NO: 4272 - protein, 16 aa, Artificial Sequence
  Non-cyclic GFR-binding peptide
  MOD_RES (14)..(15): Xaa is C or S
LYLMSIPEMKTPTXXP

SEQ ID NO: 4273 - protein, 20 aa, Artificial Sequence
  Non-cyclic GFR-binding peptide
  MOD_RES (14)..(15): Xaa is C or S
YYLISTASLKTPVXXAKSAK

SEQ ID NO: 4274 - protein, 10 aa, Artificial Sequence
  Non-cyclic GFR-binding peptide
LYLMSIPEMK

SEQ ID NO: 4275 - protein, 12 aa, Artificial Sequence
  Non-cyclic GFR-binding peptide
FYLINIPSMKEP

SEQ ID NO: 4276 - protein, 18 aa, Artificial Sequence
  Non-cyclic GFR-binding peptide
  MOD_RES (14)..(15): Xaa is C or S
YYLISTASMKEPVXXPEP

SEQ ID NO: 4277 - protein, 17 aa, Artificial Sequence
  Non-cyclic GFR-binding peptide
  MOD_RES (14)..(15): Xaa is C or S
LYLMSIPETKVPAXXTS

SEQ ID NO: 4278 - protein, 19 aa, Artificial Sequence
  Non-cyclic GFR-binding peptide
  MOD_RES (14)..(15): Xaa is C or S
YYLISTASMKEPVXXPEPI

SEQ ID NO: 4279 - protein, 18 aa, Artificial Sequence
  Non-cyclic GFR-binding peptide
  MOD_RES (14)..(15): Xaa is C or S
YYLISTASLRTPVXXTPP

SEQ ID NO: 4280 - protein, 17 aa, Artificial Sequence
  Non-cyclic GFR-binding peptide
  MOD_RES (14)..(15): Xaa is C or S
LYLISIPEMKEPVXXPE

SEQ ID NO: 4281 - protein, 15 aa, Artificial Sequence
  Non-cyclic GFR-binding peptide
  MOD_RES (14)..(15): Xaa is C or S
KYLMSIPSTKVPAXX

SEQ ID NO: 4282 - protein, 10 aa, Artificial Sequence
  Non-cyclic GFR-binding peptide
YYLMSTASTK

SEQ ID NO: 4283 - protein, 10 aa, Artificial Sequence
  Non-cyclic GFR-binding peptide
KYLMSIPSMK

SEQ ID NO: 4284 - protein, 14 aa, Artificial Sequence
  Non-cyclic GFR-binding peptide
  MOD_RES (14)..(14): Xaa is C or S
LYLISIPELRTPVX

SEQ ID NO: 4285 - protein, 11 aa, Artificial Sequence
  Non-cyclic GFR-binding peptide
YYLMSTASTKV

SEQ ID NO: 4286 - protein, 10 aa, Artificial Sequence
  Non-cyclic GFR-binding peptide
LYLISIPEMK

SEQ ID NO: 4287 - protein, 15 aa, Artificial Sequence
  Non-cyclic GFR-binding peptide
  MOD_RES (14)..(15): Xaa is C or S
FYLISIANMKEPVXX

SEQ ID NO: 4288 - protein, 9 aa, Artificial Sequence
  Non-cyclic GFR-binding peptide
YYLISTASM

SEQ ID NO: 4289 - protein, 17 aa, Artificial Sequence
  Non-cyclic GFR-binding peptide
  MOD_RES (14)..(15): Xaa is C or S
KYLMSIPSMKTPTXXPG

SEQ ID NO: 4290 - protein, 14 aa, Artificial Sequence
  Non-cyclic GFR-binding peptide
  MOD_RES (14)..(14): Xaa is C or S
KYLMSIPSTKVPAX

SEQ ID NO: 4291 - protein, 20 aa, Artificial Sequence
  Non-cyclic GFR-binding peptide
  MOD_RES (14)..(15): Xaa is C or S
LYLISIPEMKEPVXXPEPIG

SEQ ID NO: 4292 - protein, 11 aa, Artificial Sequence
  Non-cyclic GFR-binding peptide
FYLINIPSLAQ

SEQ ID NO: 4293 - protein, 19 aa, Artificial Sequence
  Non-cyclic GFR-binding peptide
  MOD_RES (14)..(15): Xaa is C or S
KYLISIPSLRTPVXXTPPT

SEQ ID NO: 4294 - protein, 20 aa, Artificial Sequence
  Non-cyclic GFR-binding peptide
  MOD_RES (14)..(15): Xaa is C or S
FYLINIPSLDQSVXXPSASA

SEQ ID NO: 4295 - protein, 16 aa, Artificial Sequence
  Non-cyclic GFR-binding peptide
  MOD_RES (14)..(15): Xaa is C or S
FYLINIPSLDQPVXXP

SEQ ID NO: 4296 - protein, 19 aa, Artificial Sequence
  Non-cyclic GFR-binding peptide
  MOD_RES (14)..(15): Xaa is C or S
YYLISTASLRAPVXXSAPA

SEQ ID NO: 4297 - protein, 18 aa, Artificial Sequence
  Non-cyclic GFR-binding peptide
  MOD_RES (14)..(15): Xaa is C or S
LYLMSIPEMKTPTXXPGA

SEQ ID NO: 4298 - protein, 13 aa, Artificial Sequence
  Non-cyclic GFR-binding peptide
KYLISIPSMKEPV

SEQ ID NO: 4299 - protein, 15 aa, Artificial Sequence
  Non-cyclic GFR-binding peptide
  MOD_RES (14)..(15): Xaa is C or S
KYLISIPSMKEPVXX

SEQ ID NO: 4300 - protein, 12 aa, Artificial Sequence
  Non-cyclic GFR-binding peptide
KYLISIPSLRTP

SEQ ID NO: 4301 - protein, 13 aa, Artificial Sequence
  Non-cyclic GFR-binding peptide
FYLISIANMKEPV

SEQ ID NO: 4302 - protein, 10 aa, Artificial Sequence
  Non-cyclic GFR-binding peptide
YYLISTASLK

SEQ ID NO: 4303 - protein, 20 aa, Artificial Sequence
  Non-cyclic GFR-binding peptide
  MOD_RES (14)..(15): Xaa is C or S
YYLISTASLRTPVXXTPPTS

SEQ ID NO: 4304 - protein, 20 aa, Artificial Sequence
  Non-cyclic GFR-binding peptide
  MOD_RES (14)..(15): Xaa is C or S
FYLINIPSMKEPVXXPEPIG

SEQ ID NO: 4305 - protein, 19 aa, Artificial Sequence
  Non-cyclic GFR-binding peptide
  MOD_RES (14)..(15): Xaa is C or S
LYLMSIPETKVPAXXTSPV

SEQ ID NO: 4306 - protein, 20 aa, Artificial Sequence
  Non-cyclic GFR-binding peptide
  MOD_RES (14)..(15): Xaa is C or S
KYLMSIPSTKVPAXXTSPVR

SEQ ID NO: 4307 - protein, 12 aa, Artificial Sequence
  Non-cyclic GFR-binding peptide
YYLMSTASMKTP

SEQ ID NO: 4308 - protein, 12 aa, Artificial Sequence
  Non-cyclic GFR-binding peptide
KYLISIPSMKEP

SEQ ID NO: 4309 - protein, 14 aa, Artificial Sequence
  Non-cyclic GFR-binding peptide
  MOD_RES (14)..(14): Xaa is C or S
KYLISIPSMKEPVX

SEQ ID NO: 4310 - protein, 17 aa, Artificial Sequence
  Non-cyclic GFR-binding peptide
  MOD_RES (14)..(15): Xaa is C or S
FYLINIPSMKEPVXXPE

SEQ ID NO: 4311 - protein, 18 aa, Artificial Sequence
  Non-cyclic GFR-binding peptide
  MOD_RES (14)..(15): Xaa is C or S
FYLISIANMKEPVXXPEP

SEQ ID NO: 4312 - protein, 15 aa, Artificial Sequence
  Non-cyclic GFR-binding peptide
  MOD_RES (14)..(15): Xaa is C or S
KYLISIPSLRTPVXX

SEQ ID NO: 4313 - protein, 12 aa, Artificial Sequence
  Non-cyclic GFR-binding peptide
FYLINIPSLAQP

SEQ ID NO: 4314 - protein, 9 aa, Artificial Sequence
  Non-cyclic GFR-binding peptide
LYLMSIPEM

SEQ ID NO: 4315 - protein, 20 aa, Artificial Sequence
  Non-cyclic GFR-binding peptide
  MOD_RES (14)..(15): Xaa is C or S
YYLMSTASMKTPTXXPGASG

SEQ ID NO: 4316 - protein, 16 aa, Artificial Sequence
  Non-cyclic GFR-binding peptide
  MOD_RES (14)..(15): Xaa is C or S
FYLINIPSMKEPVXXP

SEQ ID NO: 4317 - protein, 11 aa, Artificial Sequence
  Non-cyclic GFR-binding peptide
FYLINIPSLDQ

SEQ ID NO: 4318 - protein, 13 aa, Artificial Sequence
  Non-cyclic GFR-binding peptide
KYLISIPSLRTPV

SEQ ID NO: 4319 - protein, 19 aa, Artificial Sequence
  Non-cyclic GFR-binding peptide
  MOD_RES (14)..(15): Xaa is C or S
YYLISTASLKTPVXXAKSA

SEQ ID NO: 4320 - protein, 12 aa, Artificial Sequence
  Non-cyclic GFR-binding peptide
FYLINIPSLDQS

SEQ ID NO: 4321 - protein, 13 aa, Artificial Sequence
  Non-cyclic GFR-binding peptide
KYLMSIPSTKVPA

SEQ ID NO: 4322 - protein, 20 aa, Artificial Sequence
  Non-cyclic GFR-binding peptide
  MOD_RES (14)..(15): Xaa is C or S
FYLINIPSLAQPVXXPAASA

SEQ ID NO: 4323 - protein, 11 aa, Artificial Sequence
  Non-cyclic GFR-binding peptide
KYLISIPSLRT

SEQ ID NO: 4324 - protein, 17 aa, Artificial Sequence
  Non-cyclic GFR-binding peptide
  MOD_RES (14)..(15): Xaa is C or S
KYLISIPSLRTPVXXTP

SEQ ID NO: 4325 - protein, 19 aa, Artificial Sequence
  Non-cyclic GFR-binding peptide
  MOD_RES (14)..(15): Xaa is C or S
KYLMSIPSMKTPTXXPGAS

SEQ ID NO: 4326 - protein, 9 aa, Artificial Sequence
  Non-cyclic GFR-binding peptide
YYLMSTASM

SEQ ID NO: 4327 - protein, 16 aa, Artificial Sequence
  Non-cyclic GFR-binding peptide
  MOD_RES (14)..(15): Xaa is C or S
LYLISIPEMKEPVXXP

SEQ ID NO: 4328 - protein, 19 aa, Artificial Sequence
  Non-cyclic GFR-binding peptide
  MOD_RES (14)..(15): Xaa is C or S
FYLINIPSMKEPVXXPEPI

SEQ ID NO: 4329 - protein, 15 aa, Artificial Sequence
  Non-cyclic GFR-binding peptide
  MOD_RES (14)..(15): Xaa is C or S
YYLMSTASMKTPTXX

SEQ ID NO: 4330 - protein, 20 aa, Artificial Sequence
  Non-cyclic GFR-binding peptide
  MOD_RES (14)..(15): Xaa is C or S
LYLMSIPEMKTPTXXPGASG

SEQ ID NO: 4331 - protein, 11 aa, Artificial Sequence
  Non-cyclic GFR-binding peptide
LYLMSIPEMKT

SEQ ID NO: 4332 - protein, 15 aa, Artificial Sequence
  Non-cyclic GFR-binding peptide
  MOD_RES (14)..(15): Xaa is C or S
FYLINIPSLAQPVXX

SEQ ID NO: 4333 - protein, 18 aa, Artificial Sequence
  Non-cyclic GFR-binding peptide
  MOD_RES (14)..(15): Xaa is C or S
FYLINIPSLDQPVXXPSA

SEQ ID NO: 4334 - protein, 18 aa, Artificial Sequence
  Non-cyclic GFR-binding peptide
  MOD_RES (14)..(15): Xaa is C or S
YYLMSTASTKVPAXXTSP

SEQ ID NO: 4335 - protein, 13 aa, Artificial Sequence
  Non-cyclic GFR-binding peptide
LYLISIPEMKEPV

SEQ ID NO: 4336 - protein, 18 aa, Artificial Sequence
  Non-cyclic GFR-binding peptide
  MOD_RES (14)..(15): Xaa is C or S
YYLISTASLRAPVXXSAP

SEQ ID NO: 4337 - protein, 20 aa, Artificial Sequence
  Non-cyclic GFR-binding peptide
  MOD_RES (14)..(15): Xaa is C or S
YYLVSTASLKTPAXXPKPVH

SEQ ID NO: 4338 - protein, 9 aa, Artificial Sequence
  Non-cyclic GFR-binding peptide
FYLINIPSM

SEQ ID NO: 4339 - protein, 18 aa, Artificial Sequence
  Non-cyclic GFR-binding peptide
  MOD_RES (14)..(15): Xaa is C or S
FYLINIPSLAQPVXXPAA

SEQ ID NO: 4340 - protein, 15 aa, Artificial Sequence
  Non-cyclic GFR-binding peptide
  MOD_RES (14)..(15): Xaa is C or S
FYLINIPSMKEPVXX

SEQ ID NO: 4341 - protein, 16 aa, Artificial Sequence
  Non-cyclic GFR-binding peptide
  MOD_RES (14)..(15): Xaa is C or S
YYLISTASLKTPVXXA

SEQ ID NO: 4342 - protein, 19 aa, Artificial Sequence
  Non-cyclic GFR-binding peptide
  MOD_RES (14)..(15): Xaa is C or S
YYLMSTASMKTPTXXPGAS

SEQ ID NO: 4343 - protein, 12 aa, Artificial Sequence
  Non-cyclic GFR-binding peptide
YYLISTASMKEP

SEQ ID NO: 4344 - protein, 11 aa, Artificial Sequence
  Non-cyclic GFR-binding peptide
FYLINIPSMKE

SEQ ID NO: 4345 - protein, 11 aa, Artificial Sequence
  Non-cyclic GFR-binding peptide
YYLISTASLRT

SEQ ID NO: 4346 - protein, 20 aa, Artificial Sequence
  Non-cyclic GFR-binding peptide
  MOD_RES (14)..(15): Xaa is C or S
KYLISIPSMKEPVXXPEPIG

SEQ ID NO: 4347 - protein, 10 aa, Artificial Sequence
  Non-cyclic GFR-binding peptide
YYLISTASLR

SEQ ID NO: 4348 - protein, 15 aa, Artificial Sequence
  Non-cyclic GFR-binding peptide
  MOD_RES (14)..(15): Xaa is C or S
FYLINIPSLDQSVXX

SEQ ID NO: 4349 - protein, 9 aa, Artificial Sequence
  Non-cyclic GFR-binding peptide
KYLMSIPSM

SEQ ID NO: 4350 - protein, 9 aa, Artificial Sequence
  Non-cyclic GFR-binding peptide
YYLMSTAST

SEQ ID NO: 4351 - protein, 16 aa, Artificial Sequence
  Non-cyclic GFR-binding peptide
  MOD_RES (14)..(15): Xaa is C or S
FYLINIPSLAQPVXXP

SEQ ID NO: 4352 - protein, 11 aa, Artificial Sequence
  Non-cyclic GFR-binding peptide
KYLMSIPSTKV

SEQ ID NO: 4353 - protein, 12 aa, Artificial Sequence
  Non-cyclic GFR-binding peptide
LYLISIPEMKEP

SEQ ID NO: 4354 - protein, 18 aa, Artificial Sequence
  Non-cyclic GFR-binding peptide
  MOD_RES (14)..(15): Xaa is C or S
KYLMSIPSTKVPAXXTSP

SEQ ID NO: 4355 - protein, 10 aa, Artificial Sequence
  Non-cyclic GFR-binding peptide
FYLINIPSMK

SEQ ID NO: 4356 - protein, 11 aa, Artificial Sequence
  Non-cyclic GFR-binding peptide
YYLMSTASMKT

SEQ ID NO: 4357 - protein, 20 aa, Artificial Sequence
  Non-cyclic GFR-binding peptide
  MOD_RES (14)..(15): Xaa is C or S
LYLMSIPETKVPAXXTSPVR

SEQ ID NO: 4358 - protein, 14 aa, Artificial Sequence
  Non-cyclic GFR-binding peptide
  MOD_RES (14)..(14): Xaa is C or S
YYLMSTASMKTPTX

SEQ ID NO: 4359 - protein, 12 aa, Artificial Sequence
  Non-cyclic GFR-binding peptide
YYLISTASLKTP

SEQ ID NO: 4360 - protein, 16 aa, Artificial Sequence
  Non-cyclic GFR-binding peptide
  MOD_RES (14)..(15): Xaa is C or S
YYLMSTASTKVPAXXT

SEQ ID NO: 4361 - protein, 15 aa, Artificial Sequence
  Non-cyclic GFR-binding peptide
  MOD_RES (14)..(15): Xaa is C or S
KYLMSIPSMKTPTXX

SEQ ID NO: 4362 - protein, 16 aa, Artificial Sequence
  Non-cyclic GFR-binding peptide
  MOD_RES (14)..(15): Xaa is C or S
FYLINIPSLDQSVXXP

SEQ ID NO: 4363 - protein, 17 aa, Artificial Sequence
  Non-cyclic GFR-binding peptide
  MOD_RES (14)..(15): Xaa is C or S
YYLMSTASTKVPAXXTS

SEQ ID NO: 4364 - protein, 13 aa, Artificial Sequence
  Non-cyclic GFR-binding peptide
YYLISTASMKEPV

SEQ ID NO: 4365 - protein, 19 aa, Artificial Sequence
  Non-cyclic GFR-binding peptide
  MOD_RES (14)..(15): Xaa is C or S
LYLMSIPEMKTPTXXPGAS

SEQ ID NO: 4366 - protein, 12 aa, Artificial Sequence
  Non-cyclic GFR-binding peptide
FYLISIANMKEP

SEQ ID NO: 4367 - protein, 13 aa, Artificial Sequence
  Non-cyclic GFR-binding peptide
LYLMSIPETKVPA

SEQ ID NO: 4368 - protein, 16 aa, Artificial Sequence
  Non-cyclic GFR-binding peptide
  MOD_RES (14)..(15): Xaa is C or S
KYLMSIPSTKVPAXXT

SEQ ID NO: 4369 - protein, 17 aa, Artificial Sequence
  Non-cyclic GFR-binding peptide
  MOD_RES (14)..(15): Xaa is C or S
FYLINIPSLDQSVXXPS

SEQ ID NO: 4370 - protein, 9 aa, Artificial Sequence
  Non-cyclic GFR-binding peptide
KYLMSIPST

SEQ ID NO: 4371 - protein, 20 aa, Artificial Sequence
  Non-cyclic GFR-binding peptide
  MOD_RES (14)..(15): Xaa is C or S
FYLINIPSLDQPVXXPSASA

SEQ ID NO: 4372 - protein, 11 aa, Artificial Sequence
  Non-cyclic GFR-binding peptide
YYLISTASLRA

SEQ ID NO: 4373 - protein, 13 aa, Artificial Sequence
  Non-cyclic GFR-binding peptide
YYLISTASLKTPV

SEQ ID NO: 4374 - protein, 19 aa, Artificial Sequence
  Non-cyclic GFR-binding peptide
  MOD_RES (14)..(15): Xaa is C or S
FYLINIPSLAQPVXXPAAS

SEQ ID NO: 4375 - protein, 17 aa, Artificial Sequence
  Non-cyclic GFR-binding peptide
  MOD_RES (14)..(15): Xaa is C or S
KYLMSIPSTKVPAXXTS

SEQ ID NO: 4376 - protein, 15 aa, Artificial Sequence
  Non-cyclic GFR-binding peptide
  MOD_RES (14)..(15): Xaa is C or S
LYLISIPELRTPVXX

SEQ ID NO: 4377 - protein, 14 aa, Artificial Sequence
  Non-cyclic GFR-binding peptide
  MOD_RES (14)..(14): Xaa is C or S
KYLMSIPSMKTPTX

SEQ ID NO: 4378 - protein, 14 aa, Artificial Sequence
  Non-cyclic GFR-binding peptide
  MOD_RES (14)..(14): Xaa is C or S
FYLINIPSMKEPVX

SEQ ID NO: 4379 - protein, 13 aa, Artificial Sequence
  Non-cyclic GFR-binding peptide
VPTRLSATSILYY

SEQ ID NO: 4380 - protein, 14 aa, Artificial Sequence
  Non-cyclic GFR-binding peptide
  MOD_RES (1)..(1): Xaa is C or S
XVPEKMSATSILYY

SEQ ID NO: 4381 - protein, 18 aa, Artificial Sequence
  Non-cyclic GFR-binding peptide
  MOD_RES (4)..(5): Xaa is C or S
PEPXXVPEKMSPINILYF

SEQ ID NO: 4382 - protein, 20 aa, Artificial Sequence
  Non-cyclic GFR-binding peptide
  MOD_RES (6)..(7): Xaa is C or S
GSAGPXXTPTKMSPISMLYK

SEQ ID NO: 4383 - protein, 11 aa, Artificial Sequence
  Non-cyclic GFR-binding peptide
TKMSPISMLYK

SEQ ID NO: 4384 - protein, 9 aa, Artificial Sequence
  Non-cyclic GFR-binding peptide
MSPISILYK

SEQ ID NO: 4385 - protein, 11 aa, Artificial Sequence
  Non-cyclic GFR-binding peptide
TRLEPISILYL

SEQ ID NO: 4386 - protein, 19 aa, Artificial Sequence
  Non-cyclic GFR-binding peptide
  MOD_RES (5)..(6): Xaa is C or S
VPSTXXAPVKTSATSMLYY

SEQ ID NO: 4387 - protein, 16 aa, Artificial Sequence
  Non-cyclic GFR-binding peptide
  MOD_RES (2)..(3): Xaa is C or S
PXXVPEKMSPISILYK

SEQ ID NO: 4388 - protein, 12 aa, Artificial Sequence
  Non-cyclic GFR-binding peptide
PTKMEPISMLYL

SEQ ID NO: 4389 - protein, 15 aa, Artificial Sequence
  Non-cyclic GFR-binding peptide
  MOD_RES (1)..(2): Xaa is C or S
XXVPARLSATSILYY

SEQ ID NO: 4390 - protein, 14 aa, Artificial Sequence
  Non-cyclic GFR-binding peptide
  MOD_RES (1)..(1): Xaa is C or S
XVPARLSATSILYY

SEQ ID NO: 4391 - protein, 14 aa, Artificial Sequence
  Non-cyclic GFR-binding peptide
  MOD_RES (1)..(1): Xaa is C or S
XVPQDLSPINILYF

SEQ ID NO: 4392 - protein, 17 aa, Artificial Sequence
  Non-cyclic GFR-binding peptide
  MOD_RES (3)..(4): Xaa is C or S
APXXVPQALSPINILYF

SEQ ID NO: 4393 - protein, 9 aa, Artificial Sequence
  Non-cyclic GFR-binding peptide
MNAISILYF

SEQ ID NO: 4394 - protein, 17 aa, Artificial Sequence
  Non-cyclic GFR-binding peptide
  MOD_RES (3)..(4): Xaa is C or S
GPXXTPTKMSATSMLYY

SEQ ID NO: 4395 - protein, 17 aa, Artificial Sequence
  Non-cyclic GFR-binding peptide
  MOD_RES (3)..(4): Xaa is C or S
SPXXVPQDLSPINILYF

SEQ ID NO: 4396 - protein, 15 aa, Artificial Sequence
  Non-cyclic GFR-binding peptide
  MOD_RES (1)..(2): Xaa is C or S
XXTPTKMEPISMLYL

SEQ ID NO: 4397 - protein, 13 aa, Artificial Sequence
  Non-cyclic GFR-binding peptide
TPTKMEPISMLYL

SEQ ID NO: 4398 - protein, 20 aa, Artificial Sequence
  Non-cyclic GFR-binding peptide
  MOD_RES (6)..(7): Xaa is C or S
HVPKPXXAPTKLSPISVLYK

SEQ ID NO: 4399 - protein, 15 aa, Artificial Sequence
  Non-cyclic GFR-binding peptide
  MOD_RES (1)..(2): Xaa is C or S
XXAPVKTSATSMLYY

SEQ ID NO: 4400 - protein, 19 aa, Artificial Sequence
  Non-cyclic GFR-binding peptide
  MOD_RES (5)..(6): Xaa is C or S
SASPXXVPQDLSPINILYF

SEQ ID NO: 4401 - protein, 20 aa, Artificial Sequence
  Non-cyclic GFR-binding peptide
  MOD_RES (6)..(7): Xaa is C or S
GIPEPXXVPEKMSATSILYY

SEQ ID NO: 4402 - protein, 10 aa, Artificial Sequence
  Non-cyclic GFR-binding peptide
KTEPISMLYL

SEQ ID NO: 4403 - protein, 14 aa, Artificial Sequence
  Non-cyclic GFR-binding peptide
  MOD_RES (1)..(1): Xaa is C or S
XVPQALSPINILYF

SEQ ID NO: 4404 - protein, 10 aa, Artificial Sequence
  Non-cyclic GFR-binding peptide
KTSPISMLYK

SEQ ID NO: 4405 - protein, 17 aa, Artificial Sequence
  Non-cyclic GFR-binding peptide
  MOD_RES (3)..(4): Xaa is C or S
PTXXVPTRLSATSILYY

SEQ ID NO: 4406 - protein, 18 aa, Artificial Sequence
  Non-cyclic GFR-binding peptide
  MOD_RES (4)..(5): Xaa is C or S
PSTXXAPVKTEPISMLYL

SEQ ID NO: 4407 - protein, 20 aa, Artificial Sequence
  Non-cyclic GFR-binding peptide
  MOD_RES (6)..(7): Xaa is C or S
AAPASXXVPARLSATSILYY

SEQ ID NO: 4408 - protein, 18 aa, Artificial Sequence
  Non-cyclic GFR-binding peptide
  MOD_RES (4)..(5): Xaa is C or S
ASPXXVSQDLSPINILYF

SEQ ID NO: 4409 - protein, 18 aa, Artificial Sequence
  Non-cyclic GFR-binding peptide
  MOD_RES (4)..(5): Xaa is C or S
PPTXXVPTRLSPISILYK

SEQ ID NO: 4410 - protein, 12 aa, Artificial Sequence
  Non-cyclic GFR-binding peptide
PVKTEPISMLYL

SEQ ID NO: 4411 - protein, 16 aa, Artificial Sequence
  Non-cyclic GFR-binding peptide
  MOD_RES (2)..(3): Xaa is C or S
PXXTPTKMSPISMLYK

SEQ ID NO: 4412 - protein, 12 aa, Artificial Sequence
  Non-cyclic GFR-binding peptide
PQDLSPINILYF

SEQ ID NO: 4413 - protein, 14 aa, Artificial Sequence
  Non-cyclic GFR-binding peptide
  MOD_RES (1)..(1): Xaa is C or S
XVPTRLSATSILYY

SEQ ID NO: 4414 - protein, 13 aa, Artificial Sequence
  Non-cyclic GFR-binding peptide
APVKTSATSMLYY

SEQ ID NO: 4415 - protein, 12 aa, Artificial Sequence
  Non-cyclic GFR-binding peptide
PTRLSATSILYY

SEQ ID NO: 4416 - protein, 14 aa, Artificial Sequence
  Non-cyclic GFR-binding peptide
  MOD_RES (1)..(1): Xaa is C or S
XTPTKMEPISMLYL

SEQ ID NO: 4417 - protein, 18 aa, Artificial Sequence
  Non-cyclic GFR-binding peptide
  MOD_RES (4)..(5): Xaa is C or S
SKAXXVPTKLSATSILYY

SEQ ID NO: 4418 - protein, 16 aa, Artificial Sequence
  Non-cyclic GFR-binding peptide
  MOD_RES (2)..(3): Xaa is C or S
PXXVPEKMNAISILYF

SEQ ID NO: 4419 - protein, 20 aa, Artificial Sequence
  Non-cyclic GFR-binding peptide
  MOD_RES (6)..(7): Xaa is C or S
STPPTXXVPTRLSPISILYK

SEQ ID NO: 4420 - protein, 15 aa, Artificial Sequence
  Non-cyclic GFR-binding peptide
  MOD_RES (1)..(2): Xaa is C or S
XXVPTRLSATSILYY

SEQ ID NO: 4421 - protein, 14 aa, Artificial Sequence
  Non-cyclic GFR-binding peptide
  MOD_RES (1)..(1): Xaa is C or S
XVSQDLSPINILYF

SEQ ID NO: 4422 - protein, 10 aa, Artificial Sequence
  Non-cyclic GFR-binding peptide
KMSATSMLYY

SEQ ID NO: 4423 - protein, 17 aa, Artificial Sequence
  Non-cyclic GFR-binding peptide
  MOD_RES (3)..(4): Xaa is C or S
EPXXVPEKMNAISILYF

SEQ ID NO: 4424 - protein, 14 aa, Artificial Sequence
  Non-cyclic GFR-binding peptide
  MOD_RES (1)..(1): Xaa is C or S
XAPVKTSATSMLYY

SEQ ID NO: 4425 - protein, 16 aa, Artificial Sequence
  Non-cyclic GFR-binding peptide
  MOD_RES (2)..(3): Xaa is C or S
TXXAPVKTEPISMLYL

SEQ ID NO: 4426 - protein, 15 aa, Artificial Sequence
  Non-cyclic GFR-binding peptide
  MOD_RES (1)..(2): Xaa is C or S
XXVPQDLSPINILYF

SEQ ID NO: 4427 - protein, 19 aa, Artificial Sequence
  Non-cyclic GFR-binding peptide
  MOD_RES (5)..(6): Xaa is C or S
IPEPXXVPEKMSPISILYK

SEQ ID NO: 4428 - protein, 19 aa, Artificial Sequence
  Non-cyclic GFR-binding peptide
  MOD_RES (5)..(6): Xaa is C or S
TPPTXXVPTRLSATSILYY

SEQ ID NO: 4429 - protein, 20 aa, Artificial Sequence
  Non-cyclic GFR-binding peptide
  MOD_RES (6)..(7): Xaa is C or S
RVPSTXXAPVKTSATSMLYY

SEQ ID NO: 4430 - protein, 11 aa, Artificial Sequence
  Non-cyclic GFR-binding peptide
EKMEPISILYL

SEQ ID NO: 4431 - protein, 17 aa, Artificial Sequence
  Non-cyclic GFR-binding peptide
  MOD_RES (3)..(4): Xaa is C or S
ASXXVPARLSATSILYY

SEQ ID NO: 4432 - protein, 18 aa, Artificial Sequence
  Non-cyclic GFR-binding peptide
  MOD_RES (4)..(5): Xaa is C or S
PEPXXVPEKMEPISILYL

SEQ ID NO: 4433 - protein, 16 aa, Artificial Sequence
  Non-cyclic GFR-binding peptide
  MOD_RES (2)..(3): Xaa is C or S
PXXTPTKMSATSMLYY

SEQ ID NO: 4434 - protein, 16 aa, Artificial Sequence
  Non-cyclic GFR-binding peptide
  MOD_RES (2)..(3): Xaa is C or S
TXXVPTRLEPISILYL

SEQ ID NO: 4435 - protein, 13 aa, Artificial Sequence
  Non-cyclic GFR-binding peptide
VPQDLSPINILYF

SEQ ID NO: 4436 - protein, 10 aa, Artificial Sequence
  Non-cyclic GFR-binding peptide
DLSPINILYF

SEQ ID NO: 4437 - protein, 12 aa, Artificial Sequence
  Non-cyclic GFR-binding peptide
PTKMSPISMLYK

SEQ ID NO: 4438 - protein, 10 aa, Artificial Sequence
  Non-cyclic GFR-binding peptide
KMNAISILYF

SEQ ID NO: 4439 - protein, 19 aa, Artificial Sequence
  Non-cyclic GFR-binding peptide
  MOD_RES (5)..(6): Xaa is C or S
SASPXXVSQDLSPINILYF

SEQ ID NO: 4440 - protein, 12 aa, Artificial Sequence
  Non-cyclic GFR-binding peptide
PTRLEPISILYL

SEQ ID NO: 4441 - protein, 14 aa, Artificial Sequence
  Non-cyclic GFR-binding peptide
  MOD_RES (1)..(1): Xaa is C or S
XVPTRLSPISILYK

SEQ ID NO: 4442 - protein, 15 aa, Artificial Sequence
  Non-cyclic GFR-binding peptide
  MOD_RES (1)..(2): Xaa is C or S
XXVPEKMEPISILYL

SEQ ID NO: 4443 - protein, 20 aa, Artificial Sequence
  Non-cyclic GFR-binding peptide
  MOD_RES (6)..(7): Xaa is C or S
GIPEPXXVPEKMNAISILYF

SEQ ID NO: 4444 - protein, 17 aa, Artificial Sequence
  Non-cyclic GFR-binding peptide
  MOD_RES (3)..(4): Xaa is C or S
EPXXVPEKMSPISILYK

SEQ ID NO: 4445 - protein, 9 aa, Artificial Sequence
  Non-cyclic GFR-binding peptide
MEPISILYL

SEQ ID NO: 4446 - protein, 16 aa, Artificial Sequence
  Non-cyclic GFR-binding peptide
  MOD_RES (2)..(3): Xaa is C or S
TXXVPTRLSATSILYY

SEQ ID NO: 4447 - protein, 10 aa, Artificial Sequence
  Non-cyclic GFR-binding peptide
ALSPINILYF

SEQ ID NO: 4448 - protein, 13 aa, Artificial Sequence
  Non-cyclic GFR-binding peptide
VPQALSPINILYF

SEQ ID NO: 4449 - protein, 11 aa, Artificial Sequence
  Non-cyclic GFR-binding peptide
EKMNAISILYF

SEQ ID NO: 4450 - protein, 12 aa, Artificial Sequence
  Non-cyclic GFR-binding peptide
PVKTSATSMLYY

SEQ ID NO: 4451 - protein, 17 aa, Artificial Sequence
  Non-cyclic GFR-binding peptide
  MOD_RES (3)..(4): Xaa is C or S
PTXXVPTRLEPISILYL

SEQ ID NO: 4452 - protein, 9 aa, Artificial Sequence
  Non-cyclic GFR-binding peptide
TEPISMLYL

SEQ ID NO: 4453 - protein, 13 aa, Artificial Sequence
  Non-cyclic GFR-binding peptide
TPTKMSPISMLYK

SEQ ID NO: 4454 - protein, 13 aa, Artificial Sequence
  Non-cyclic GFR-binding peptide
TPTKMSATSMLYY

SEQ ID NO: 4455 - protein, 20 aa, Artificial Sequence
  Non-cyclic GFR-binding peptide
  MOD_RES (6)..(7): Xaa is C or S
STPPTXXVPTRLEPISILYL

SEQ ID NO: 4456 - protein, 10 aa, Artificial Sequence
  Non-cyclic GFR-binding peptide
KMSPISILYK

SEQ ID NO: 4457 - protein, 13 aa, Artificial Sequence
  Non-cyclic GFR-binding peptide
VSQDLSPINILYF

SEQ ID NO: 4458 - protein, 12 aa, Artificial Sequence
  Non-cyclic GFR-binding peptide
PARLSATSILYY

SEQ ID NO: 4459 - protein, 17 aa, Artificial Sequence
  Non-cyclic GFR-binding peptide
  MOD_RES (3)..(4): Xaa is C or S
GPXXTPTKMEPISMLYL

SEQ ID NO: 4460 - protein, 18 aa, Artificial Sequence
  Non-cyclic GFR-binding peptide
  MOD_RES (4)..(5): Xaa is C or S
AGPXXTPTKMSATSMLYY

SEQ ID NO: 4461 - protein, 19 aa, Artificial Sequence
  Non-cyclic GFR-binding peptide
  MOD_RES (5)..(6): Xaa is C or S
VPSTXXAPVKTSPISMLYK

SEQ ID NO: 4462 - protein, 16 aa, Artificial Sequence
  Non-cyclic GFR-binding peptide
  MOD_RES (2)..(3): Xaa is C or S
SXXVPARLSATSILYY

SEQ ID NO: 4463 - protein, 19 aa, Artificial Sequence
  Non-cyclic GFR-binding peptide
  MOD_RES (5)..(6): Xaa is C or S
IPEPXXVPEKMNAISILYF

SEQ ID NO: 4464 - protein, 20 aa, Artificial Sequence
  Non-cyclic GFR-binding peptide
  MOD_RES (6)..(7): Xaa is C or S
HVPKPXXAPTKLEPISVLYL

SEQ ID NO: 4465 - protein, 18 aa, Artificial Sequence
  Non-cyclic GFR-binding peptide
  MOD_RES (4)..(5): Xaa is C or S
PEPXXVPEKMSPISILYK

SEQ ID NO: 4466 - protein, 14 aa, Artificial Sequence
  Non-cyclic GFR-binding peptide
  MOD_RES (1)..(1): Xaa is C or S
XVPTKLSATSILYY

SEQ ID NO: 4467 - protein, 13 aa, Artificial Sequence
  Non-cyclic GFR-binding peptide
VPEKMSPINILYF

SEQ ID NO: 4468 - protein, 10 aa, Artificial Sequence
  Non-cyclic GFR-binding peptide
KMSATSILYY

SEQ ID NO: 4469 - protein, 12 aa, Artificial Sequence
  Non-cyclic GFR-binding peptide
PVKTSPISMLYK

SEQ ID NO: 4470 - protein, 14 aa, Artificial Sequence
  Non-cyclic GFR-binding peptide
  MOD_RES (1)..(1): Xaa is C or S
XVPEKMEPISILYL

SEQ ID NO: 4471 - protein, 17 aa, Artificial Sequence
  Non-cyclic GFR-binding peptide
  MOD_RES (3)..(4): Xaa is C or S
EPXXVPEKMSATSILYY

SEQ ID NO: 4472 - protein, 14 aa, Artificial Sequence
  Non-cyclic GFR-binding peptide
  MOD_RES (1)..(1): Xaa is C or S
XVPEKMNAISILYF

SEQ ID NO: 4473 - protein, 17 aa, Artificial Sequence
  Non-cyclic GFR-binding peptide
  MOD_RES (3)..(4): Xaa is C or S
KAXXVPTKLSATSILYY

SEQ ID NO: 4474 - protein, 11 aa, Artificial Sequence
  Non-cyclic GFR-binding peptide
EKMSPISILYK

SEQ ID NO: 4475 - protein, 13 aa, Artificial Sequence
  Non-cyclic GFR-binding peptide
VPARLSATSILYY

SEQ ID NO: 4476 - protein, 11 aa, Artificial Sequence
  Non-cyclic GFR-binding peptide
TKLSATSILYY

SEQ ID NO: 4477 - protein, 19 aa, Artificial Sequence
  Non-cyclic GFR-binding peptide
  MOD_RES (5)..(6): Xaa is C or S
IPEPXXVPEKMEPISILYL

SEQ ID NO: 4478 - protein, 11 aa, Artificial Sequence
  Non-cyclic GFR-binding peptide
VKTEPISMLYL

SEQ ID NO: 4479 - protein, 16 aa, Artificial Sequence
  Non-cyclic GFR-binding peptide
  MOD_RES (2)..(3): Xaa is C or S
TXXVPTRLSPISILYK

SEQ ID NO: 4480 - protein, 15 aa, Artificial Sequence
  Non-cyclic GFR-binding peptide
  MOD_RES (1)..(2): Xaa is C or S
XXVPEKMSATSILYY

SEQ ID NO: 4481 - protein, 11 aa, Artificial Sequence
  Non-cyclic GFR-binding peptide
EKMSATSILYY

SEQ ID NO: 4482 - protein, 19 aa, Artificial Sequence
  Non-cyclic GFR-binding peptide
  MOD_RES (5)..(6): Xaa is C or S
TPPTXXVPTRLEPISILYL

SEQ ID NO: 4483 - protein, 18 aa, Artificial Sequence
  Non-cyclic GFR-binding peptide
  MOD_RES (4)..(5): Xaa is C or S
AGPXXTPTKMSPISMLYK

SEQ ID NO: 4484 - protein, 14 aa, Artificial Sequence
  Non-cyclic GFR-binding peptide
  MOD_RES (1)..(1): Xaa is C or S
XAPVKTEPISMLYL

SEQ ID NO: 4485 - protein, 18 aa, Artificial Sequence
  Non-cyclic GFR-binding peptide
  MOD_RES (4)..(5): Xaa is C or S
PPTXXVPTRLEPISILYL

SEQ ID NO: 4486 - protein, 15 aa, Artificial Sequence
  Non-cyclic GFR-binding peptide
  MOD_RES (1)..(2): Xaa is C or S
XXAPVKTEPISMLYL

SEQ ID NO: 4487 - protein, 16 aa, Artificial Sequence
  Non-cyclic GFR-binding peptide
  MOD_RES (2)..(3): Xaa is C or S
PXXVPEKMSATSILYY

SEQ ID NO: 4488 - protein, 15 aa, Artificial Sequence
  Non-cyclic GFR-binding peptide
  MOD_RES (1)..(2): Xaa is C or S
XXVPTKLSATSILYY

SEQ ID NO: 4489 - protein, 13 aa, Artificial Sequence
  Non-cyclic GFR-binding peptide
VPTRLEPISILYL

SEQ ID NO: 4490 - protein, 16 aa, Artificial Sequence
  Non-cyclic GFR-binding peptide
  MOD_RES (2)..(3): Xaa is C or S
PXXTPTKMEPISMLYL

SEQ ID NO: 4491 - protein, 20 aa, Artificial Sequence
  Non-cyclic GFR-binding peptide
  MOD_RES (6)..(7): Xaa is C or S
KASKAXXVPTKLSATSILYY

SEQ ID NO: 4492 - protein, 10 aa, Artificial Sequence
  Non-cyclic GFR-binding peptide
KMEPISMLYL

SEQ ID NO: 4493 - protein, 12 aa, Artificial Sequence
  Non-cyclic GFR-binding peptide
PEKMSPINILYF

SEQ ID NO: 4494 - protein, 18 aa, Artificial Sequence
  Non-cyclic GFR-binding peptide
  MOD_RES (4)..(5): Xaa is C or S
PEPXXVPEKMSATSILYY

SEQ ID NO: 4495 - protein, 17 aa, Artificial Sequence
  Non-cyclic GFR-binding peptide
  MOD_RES (3)..(4): Xaa is C or S
STXXAPVKTEPISMLYL

SEQ ID NO: 4496 - protein, 19 aa, Artificial Sequence
  Non-cyclic GFR-binding peptide
  MOD_RES (5)..(6): Xaa is C or S
IPEPXXVPEKMSATSILYY

SEQ ID NO: 4497 - protein, 18 aa, Artificial Sequence
  Non-cyclic GFR-binding peptide
  MOD_RES (4)..(5): Xaa is C or S
PPTXXVPTRLSATSILYY

SEQ ID NO: 4498 - protein, 17 aa, Artificial Sequence
  Non-cyclic GFR-binding peptide
  MOD_RES (3)..(4): Xaa is C or S
EPXXVPEKMEPISILYL

SEQ ID NO: 4499 - protein, 15 aa, Artificial Sequence
  Non-cyclic GFR-binding peptide
  MOD_RES (1)..(2): Xaa is C or S
XXAPVKTSPISMLYK

SEQ ID NO: 4500 - protein, 10 aa, Artificial Sequence
  Non-cyclic GFR-binding peptide
KTSATSMLYY

SEQ ID NO: 4501 - protein, 10 aa, Artificial Sequence
  Non-cyclic GFR-binding peptide
KMSPISMLYK

SEQ ID NO: 4502 - protein, 14 aa, Artificial Sequence
  Non-cyclic GFR-binding peptide
  MOD_RES (1)..(1): Xaa is C or S
XVPTRLEPISILYL

SEQ ID NO: 4503 - protein, 11 aa, Artificial Sequence
  Non-cyclic GFR-binding peptide
VKTSATSMLYY

SEQ ID NO: 4504 - protein, 10 aa, Artificial Sequence
  Non-cyclic GFR-binding peptide
KMEPISILYL

SEQ ID NO: 4505 - protein, 15 aa, Artificial Sequence
  Non-cyclic GFR-binding peptide
  MOD_RES (1)..(2): Xaa is C or S
XXVPEKMNAISILYF

SEQ ID NO: 4506 - protein, 9 aa, Artificial Sequence
  Non-cyclic GFR-binding peptide
MSATSILYY

SEQ ID NO: 4507 - protein, 17 aa, Artificial Sequence
  Non-cyclic GFR-binding peptide
  MOD_RES (3)..(4): Xaa is C or S
GPXXTPTKMSPISMLYK

SEQ ID NO: 4508 - protein, 14 aa, Artificial Sequence
  Non-cyclic GFR-binding peptide
  MOD_RES (1)..(1): Xaa is C or S
XAPVKTSPISMLYK

SEQ ID NO: 4509 - protein, 20 aa, Artificial Sequence
  Non-cyclic GFR-binding peptide
  MOD_RES (6)..(7): Xaa is C or S
GIPEPXXVPEKMEPISILYL

SEQ ID NO: 4510 - protein, 11 aa, Artificial Sequence
  Non-cyclic GFR-binding peptide
QALSPINILYF

SEQ ID NO: 4511 - protein, 19 aa, Artificial Sequence
  Non-cyclic GFR-binding peptide
  MOD_RES (5)..(6): Xaa is C or S
TPPTXXVPTRLSPISILYK

SEQ ID NO: 4512 - protein, 20 aa, Artificial Sequence
  Non-cyclic GFR-binding peptide
  MOD_RES (6)..(7): Xaa is C or S
ASASPXXVSQDLSPINILYF

SEQ ID NO: 4513 - protein, 16 aa, Artificial Sequence
  Non-cyclic GFR-binding peptide
  MOD_RES (2)..(3): Xaa is C or S
PXXVPQDLSPINILYF

SEQ ID NO: 4514 - protein, 19 aa, Artificial Sequence
  Non-cyclic GFR-binding peptide
  MOD_RES (5)..(6): Xaa is C or S
APASXXVPARLSATSILYY

SEQ ID NO: 4515 - protein, 18 aa, Artificial Sequence
  Non-cyclic GFR-binding peptide
  MOD_RES (4)..(5): Xaa is C or S
AGPXXTPTKMEPISMLYL

SEQ ID NO: 4516 - protein, 13 aa, Artificial Sequence
  Non-cyclic GFR-binding peptide
VPEKMSPISILYK

SEQ ID NO: 4517 - protein, 15 aa, Artificial Sequence
  Non-cyclic GFR-binding peptide
  MOD_RES (1)..(2): Xaa is C or S
XXVPEKMSPISILYK

SEQ ID NO: 4518 - protein, 12 aa, Artificial Sequence
  Non-cyclic GFR-binding peptide
PTRLSPISILYK

SEQ ID NO: 4519 - protein, 13 aa, Artificial Sequence
  Non-cyclic GFR-binding peptide
VPEKMNAISILYF

SEQ ID NO: 4520 - protein, 10 aa, Artificial Sequence
  Non-cyclic GFR-binding peptide
KLSATSILYY

SEQ ID NO: 4521 - protein, 20 aa, Artificial Sequence
  Non-cyclic GFR-binding peptide
  MOD_RES (6)..(7): Xaa is C or S
STPPTXXVPTRLSATSILYY

SEQ ID NO: 4522 - protein, 20 aa, Artificial Sequence
  Non-cyclic GFR-binding peptide
  MOD_RES (6)..(7): Xaa is C or S
GIPEPXXVPEKMSPINILYF

SEQ ID NO: 4523 - protein, 19 aa, Artificial Sequence
  Non-cyclic GFR-binding peptide
  MOD_RES (5)..(6): Xaa is C or S
VPSTXXAPVKTEPISMLYL

SEQ ID NO: 4524 - protein, 20 aa, Artificial Sequence
  Non-cyclic GFR-binding peptide
  MOD_RES (6)..(7): Xaa is C or S
RVPSTXXAPVKTSPISMLYK

SEQ ID NO: 4525 - protein, 12 aa, Artificial Sequence
  Non-cyclic GFR-binding peptide
PTKMSATSMLYY

SEQ ID NO: 4526 - protein, 12 aa, Artificial Sequence
  Non-cyclic GFR-binding peptide
PEKMSPISILYK

SEQ ID NO: 4527 - protein, 14 aa, Artificial Sequence
  Non-cyclic GFR-binding peptide
  MOD_RES (1)..(1): Xaa is C or S
XVPEKMSPISILYK

SEQ ID NO: 4528 - protein, 17 aa, Artificial Sequence
  Non-cyclic GFR-binding peptide
  MOD_RES (3)..(4): Xaa is C or S
EPXXVPEKMSPINILYF

SEQ ID NO: 4529 - protein, 18 aa, Artificial Sequence
  Non-cyclic GFR-binding peptide
  MOD_RES (4)..(5): Xaa is C or S
PEPXXVPEKMNAISILYF

SEQ ID NO: 4530 - protein, 15 aa, Artificial Sequence
  Non-cyclic GFR-binding peptide
  MOD_RES (1)..(2): Xaa is C or S
XXVPTRLSPISILYK

SEQ ID NO: 4531 - protein, 12 aa, Artificial Sequence
  Non-cyclic GFR-binding peptide
PQALSPINILYF

SEQ ID NO: 4532 - protein, 9 aa, Artificial Sequence
  Non-cyclic GFR-binding peptide
MEPISMLYL

SEQ ID NO: 4533 - protein, 20 aa, Artificial Sequence
  Non-cyclic GFR-binding peptide
  MOD_RES (6)..(7): Xaa is C or S
GSAGPXXTPTKMSATSMLYY

SEQ ID NO: 4534 - protein, 16 aa, Artificial Sequence
  Non-cyclic GFR-binding peptide
  MOD_RES (2)..(3): Xaa is C or S
PXXVPEKMSPINILYF

SEQ ID NO: 4535 - protein, 11 aa, Artificial Sequence
  Non-cyclic GFR-binding peptide
QDLSPINILYF

SEQ ID NO: 4536 - protein, 13 aa, Artificial Sequence
  Non-cyclic GFR-binding peptide
VPTRLSPISILYK

SEQ ID NO: 4537 - protein, 19 aa, Artificial Sequence
  Non-cyclic GFR-binding peptide
  MOD_RES (5)..(6): Xaa is C or S
ASKAXXVPTKLSATSILYY

SEQ ID NO: 4538 - protein, 12 aa, Artificial Sequence
  Non-cyclic GFR-binding peptide
SQDLSPINILYF

SEQ ID NO: 4539 - protein, 13 aa, Artificial Sequence
  Non-cyclic GFR-binding peptide
APVKTSPISMLYK

SEQ ID NO: 4540 - protein, 20 aa, Artificial Sequence
  Non-cyclic GFR-binding peptide
  MOD_RES (6)..(7): Xaa is C or S
ASAAPXXVPQALSPINILYF

SEQ ID NO: 4541 - protein, 11 aa, Artificial Sequence
  Non-cyclic GFR-binding peptide
TRLSPISILYK

SEQ ID NO: 4542 - protein, 17 aa, Artificial Sequence
  Non-cyclic GFR-binding peptide
  MOD_RES (3)..(4): Xaa is C or S
PTXXVPTRLSPISILYK

SEQ ID NO: 4543 - protein, 19 aa, Artificial Sequence
  Non-cyclic GFR-binding peptide
  MOD_RES (5)..(6): Xaa is C or S
SAGPXXTPTKMSPISMLYK

SEQ ID NO: 4544 - protein, 9 aa, Artificial Sequence
  Non-cyclic GFR-binding peptide
MSATSMLYY

SEQ ID NO: 4545 - protein, 16 aa, Artificial Sequence
  Non-cyclic GFR-binding peptide
  MOD_RES (2)..(3): Xaa is C or S
PXXVPEKMEPISILYL

SEQ ID NO: 4546 - protein, 19 aa, Artificial Sequence
  Non-cyclic GFR-binding peptide
  MOD_RES (5)..(6): Xaa is C or S
IPEPXXVPEKMSPINILYF

SEQ ID NO: 4547 - protein, 15 aa, Artificial Sequence
  Non-cyclic GFR-binding peptide
  MOD_RES (1)..(2): Xaa is C or S
XXTPTKMSATSMLYY

SEQ ID NO: 4548 - protein, 20 aa, Artificial Sequence
  Non-cyclic GFR-binding peptide
  MOD_RES (6)..(7): Xaa is C or S
GSAGPXXTPTKMEPISMLYL

SEQ ID NO: 4549 - protein, 11 aa, Artificial Sequence
  Non-cyclic GFR-binding peptide
TKMEPISMLYL

SEQ ID NO: 4550 - protein, 15 aa, Artificial Sequence
  Non-cyclic GFR-binding peptide
  MOD_RES (1)..(2): Xaa is C or S
XXVPQALSPINILYF

SEQ ID NO: 4551 - protein, 18 aa, Artificial Sequence
  Non-cyclic GFR-binding peptide
  MOD_RES (4)..(5): Xaa is C or S
ASPXXVPQDLSPINILYF

SEQ ID NO: 4552 - protein, 18 aa, Artificial Sequence
  Non-cyclic GFR-binding peptide
  MOD_RES (4)..(5): Xaa is C or S
PSTXXAPVKTSATSMLYY

SEQ ID NO: 4553 - protein, 13 aa, Artificial Sequence
  Non-cyclic GFR-binding peptide
VPEKMEPISILYL

SEQ ID NO: 4554 - protein, 18 aa, Artificial Sequence
  Non-cyclic GFR-binding peptide
  MOD_RES (4)..(5): Xaa is C or S
PASXXVPARLSATSILYY

SEQ ID NO: 4555 - protein, 20 aa, Artificial Sequence
  Non-cyclic GFR-binding peptide
  MOD_RES (6)..(7): Xaa is C or S
HVPKPXXAPTKLSATSVLYY

SEQ ID NO: 4556 - protein, 9 aa, Artificial Sequence
  Non-cyclic GFR-binding peptide
MSPINILYF

SEQ ID NO: 4557 - protein, 18 aa, Artificial Sequence
  Non-cyclic GFR-binding peptide
  MOD_RES (4)..(5): Xaa is C or S
AAPXXVPQALSPINILYF

SEQ ID NO: 4558 - protein, 15 aa, Artificial Sequence
  Non-cyclic GFR-binding peptide
  MOD_RES (1)..(2): Xaa is C or S
XXVPEKMSPINILYF

SEQ ID NO: 4559 - protein, 16 aa, Artificial Sequence
  Non-cyclic GFR-binding peptide
  MOD_RES (2)..(3): Xaa is C or S
AXXVPTKLSATSILYY

SEQ ID NO: 4560 - protein, 19 aa, Artificial Sequence
  Non-cyclic GFR-binding peptide
  MOD_RES (5)..(6): Xaa is C or S
SAGPXXTPTKMSATSMLYY

SEQ ID NO: 4561 - protein, 12 aa, Artificial Sequence
  Non-cyclic GFR-binding peptide
PEKMSATSILYY

SEQ ID NO: 4562 - protein, 11 aa, Artificial Sequence
  Non-cyclic GFR-binding peptide
EKMSPINILYF

SEQ ID NO: 4563 - protein, 11 aa, Artificial Sequence
  Non-cyclic GFR-binding peptide
TRLSATSILYY

SEQ ID NO: 4564 - protein, 20 aa, Artificial Sequence
  Non-cyclic GFR-binding peptide
  MOD_RES (6)..(7): Xaa is C or S
GIPEPXXVPEKMSPISILYK

SEQ ID NO: 4565 - protein, 10 aa, Artificial Sequence
  Non-cyclic GFR-binding peptide
RLSATSILYY

SEQ ID NO: 4566 - protein, 15 aa, Artificial Sequence
  Non-cyclic GFR-binding peptide
  MOD_RES (1)..(2): Xaa is C or S
XXVSQDLSPINILYF

SEQ ID NO: 4567 - protein, 9 aa, Artificial Sequence
  Non-cyclic GFR-binding peptide
MSPISMLYK

SEQ ID NO: 4568 - protein, 9 aa, Artificial Sequence
  Non-cyclic GFR-binding peptide
TSATSMLYY

SEQ ID NO: 4569 - protein, 16 aa, Artificial Sequence
  Non-cyclic GFR-binding peptide
  MOD_RES (2)..(3): Xaa is C or S
PXXVPQALSPINILYF

SEQ ID NO: 4570 - protein, 11 aa, Artificial Sequence
  Non-cyclic GFR-binding peptide
VKTSPISMLYK

SEQ ID NO: 4571 - protein, 12 aa, Artificial Sequence
  Non-cyclic GFR-binding peptide
PEKMEPISILYL

SEQ ID NO: 4572 - protein, 18 aa, Artificial Sequence
  Non-cyclic GFR-binding peptide
  MOD_RES (4)..(5): Xaa is C or S
PSTXXAPVKTSPISMLYK

SEQ ID NO: 4573 - protein, 10 aa, Artificial Sequence
  Non-cyclic GFR-binding peptide
KMSPINILYF

SEQ ID NO: 4574 - protein, 11 aa, Artificial Sequence
  Non-cyclic GFR-binding peptide
TKMSATSMLYY

SEQ ID NO: 4575 - protein, 20 aa, Artificial Sequence
  Non-cyclic GFR-binding peptide
  MOD_RES (6)..(7): Xaa is C or S
RVPSTXXAPVKTEPISMLYL

SEQ ID NO: 4576 - protein, 14 aa, Artificial Sequence
  Non-cyclic GFR-binding peptide
  MOD_RES (1)..(1): Xaa is C or S
XTPTKMSATSMLYY

SEQ ID NO: 4577 - protein, 12 aa, Artificial Sequence
  Non-cyclic GFR-binding peptide
PTKLSATSILYY

SEQ ID NO: 4578 - protein, 16 aa, Artificial Sequence
  Non-cyclic GFR-binding peptide
  MOD_RES (2)..(3): Xaa is C or S
TXXAPVKTSATSMLYY

SEQ ID NO: 4579 - protein, 15 aa, Artificial Sequence
  Non-cyclic GFR-binding peptide
  MOD_RES (1)..(2): Xaa is C or S
XXTPTKMSPISMLYK

SEQ ID NO: 4580 - protein, 16 aa, Artificial Sequence
  Non-cyclic GFR-binding peptide
  MOD_RES (2)..(3): Xaa is C or S
PXXVSQDLSPINILYF

SEQ ID NO: 4581 - protein, 17 aa, Artificial Sequence
  Non-cyclic GFR-binding peptide
  MOD_RES (3)..(4): Xaa is C or S
STXXAPVKTSATSMLYY

SEQ ID NO: 4582 - protein, 13 aa, Artificial Sequence
  Non-cyclic GFR-binding peptide
VPEKMSATSILYY

SEQ ID NO: 4583 - protein, 19 aa, Artificial Sequence
  Non-cyclic GFR-binding peptide
  MOD_RES (5)..(6): Xaa is C or S
SAGPXXTPTKMEPISMLYL

SEQ ID NO: 4584 - protein, 12 aa, Artificial Sequence
  Non-cyclic GFR-binding peptide
PEKMNAISILYF

SEQ ID NO: 4585 - protein, 13 aa, Artificial Sequence
  Non-cyclic GFR-binding peptide
APVKTEPISMLYL

SEQ ID NO: 4586 - protein, 16 aa, Artificial Sequence
  Non-cyclic GFR-binding peptide
  MOD_RES (2)..(3): Xaa is C or S
TXXAPVKTSPISMLYK

SEQ ID NO: 4587 - protein, 17 aa, Artificial Sequence
  Non-cyclic GFR-binding peptide
  MOD_RES (3)..(4): Xaa is C or S
SPXXVSQDLSPINILYF

SEQ ID NO: 4588 - protein, 9 aa, Artificial Sequence
  Non-cyclic GFR-binding peptide
TSPISMLYK

SEQ ID NO: 4589 - protein, 20 aa, Artificial Sequence
  Non-cyclic GFR-binding peptide
  MOD_RES (6)..(7): Xaa is C or S
ASASPXXVPQDLSPINILYF

SEQ ID NO: 4590 - protein, 11 aa, Artificial Sequence
  Non-cyclic GFR-binding peptide
ARLSATSILYY

SEQ ID NO: 4591 - protein, 13 aa, Artificial Sequence
  Non-cyclic GFR-binding peptide
VPTKLSATSILYY

SEQ ID NO: 4592 - protein, 19 aa, Artificial Sequence
  Non-cyclic GFR-binding peptide
  MOD_RES (5)..(6): Xaa is C or S
SAAPXXVPQALSPINILYF

SEQ ID NO: 4593 - protein, 17 aa, Artificial Sequence
  Non-cyclic GFR-binding peptide
  MOD_RES (3)..(4): Xaa is C or S
STXXAPVKTSPISMLYK

SEQ ID NO: 4594 - protein, 15 aa, Artificial Sequence
  Non-cyclic GFR-binding peptide
  MOD_RES (1)..(2): Xaa is C or S
XXVPTRLEPISILYL

SEQ ID NO: 4595 - protein, 14 aa, Artificial Sequence
  Non-cyclic GFR-binding peptide
  MOD_RES (1)..(1): Xaa is C or S
XTPTKMSPISMLYK

SEQ ID NO: 4596 - protein, 14 aa, Artificial Sequence
  Non-cyclic GFR-binding peptide
  MOD_RES (1)..(1): Xaa is C or S
XVPEKMSPINILYF

SEQ ID NO: 4597 - protein, 19 aa, Artificial Sequence
  Non-cyclic GFR-binding peptide
  MOD_RES (14)..(15): Xaa is C or S
MIQITINSLRTPVXXTPPT

SEQ ID NO: 4598 - protein, 14 aa, Artificial Sequence
  Non-cyclic GFR-binding peptide
  MOD_RES (14)..(14): Xaa is C or S
MIQMTINSMKTPTX

SEQ ID NO: 4599 - protein, 9 aa, Artificial Sequence
  Non-cyclic GFR-binding peptide
MIQMTINST

SEQ ID NO: 4600 - protein, 16 aa, Artificial Sequence
  Non-cyclic GFR-binding peptide
  MOD_RES (14)..(15): Xaa is C or S
MIQMTINSTKVPAXXT

SEQ ID NO: 4601 - protein, 12 aa, Artificial Sequence
  Non-cyclic GFR-binding peptide
MIQITINSLRAP

SEQ ID NO: 4602 - protein, 10 aa, Artificial Sequence
  Non-cyclic GFR-binding peptide
MIQITINSLR

SEQ ID NO: 4603 - protein, 11 aa, Artificial Sequence
  Non-cyclic GFR-binding peptide
MIQITINSLRA

SEQ ID NO: 4604 - protein, 13 aa, Artificial Sequence
  Non-cyclic GFR-binding peptide
MIQMTINSTKVPA

SEQ ID NO: 4605 - protein, 18 aa, Artificial Sequence
  Non-cyclic GFR-binding peptide
  MOD_RES (14)..(15): Xaa is C or S
MIQMTINSMKTPTXXPGA

SEQ ID NO: 4606 - protein, 16 aa, Artificial Sequence
  Non-cyclic GFR-binding peptide
  MOD_RES (14)..(15): Xaa is C or S
MIQMTINSMKTPTXXP

SEQ ID NO: 4607 - protein, 15 aa, Artificial Sequence
  Non-cyclic GFR-binding peptide
  MOD_RES (14)..(15): Xaa is C or S
MIQITINSLRAPVXX

SEQ ID NO: 4608 - protein, 13 aa, Artificial Sequence
  Non-cyclic GFR-binding peptide
MIQITINSLRTPV

SEQ ID NO: 4609 - protein, 15 aa, Artificial Sequence
  Non-cyclic GFR-binding peptide
  MOD_RES (14)..(15): Xaa is C or S
MIQMTINSMKTPTXX

SEQ ID NO: 4610 - protein, 16 aa, Artificial Sequence
  Non-cyclic GFR-binding peptide
  MOD_RES (14)..(15): Xaa is C or S
MIQITINSLRAPVXXS

SEQ ID NO: 4611 - protein, 15 aa, Artificial Sequence
  Non-cyclic GFR-binding peptide
  MOD_RES (14)..(15): Xaa is C or S
MIQMTINSTKVPAXX

SEQ ID NO: 4612 - protein, 16 aa, Artificial Sequence
  Non-cyclic GFR-binding peptide
  MOD_RES (14)..(15): Xaa is C or S
MIQITINSLRTPVXXT

SEQ ID NO: 4613 - protein, 15 aa, Artificial Sequence
  Non-cyclic GFR-binding peptide
  MOD_RES (14)..(15): Xaa is C or S
MIQITINSLRTPVXX

SEQ ID NO: 4614 - protein, 18 aa, Artificial Sequence
  Non-cyclic GFR-binding peptide
  MOD_RES (14)..(15): Xaa is C or S
MIQITINSLRTPVXXTPP

SEQ ID NO: 4615 - protein, 10 aa, Artificial Sequence
  Non-cyclic GFR-binding peptide
MIQMTINSMK

SEQ ID NO: 4616 - protein, 17 aa, Artificial Sequence
  Non-cyclic GFR-binding peptide
  MOD_RES (14)..(15): Xaa is C or S
MIQMTINSMKTPTXXPG

SEQ ID NO: 4617 - protein, 13 aa, Artificial Sequence
  Non-cyclic GFR-binding peptide
MIQMTINSMKTPT

SEQ ID NO: 4618 - protein, 19 aa, Artificial Sequence
  Non-cyclic GFR-binding peptide
  MOD_RES (14)..(15): Xaa is C or S
MIQMTINSTKVPAXXTSPV

SEQ ID NO: 4619 - protein, 10 aa, Artificial Sequence
  Non-cyclic GFR-binding peptide
MIQMTINSTK

SEQ ID NO: 4620 - protein, 11 aa, Artificial Sequence
  Non-cyclic GFR-binding peptide
MIQMTINSTKV

SEQ ID NO: 4621 - protein, 17 aa, Artificial Sequence
  Non-cyclic GFR-binding peptide
  MOD_RES (14)..(15): Xaa is C or S
MIQITINSLRAPVXXSA

SEQ ID NO: 4622 - protein, 18 aa, Artificial Sequence
  Non-cyclic GFR-binding peptide
  MOD_RES (14)..(15): Xaa is C or S
MIQMTINSTKVPAXXTSP

SEQ ID NO: 4623 - protein, 17 aa, Artificial Sequence
  Non-cyclic GFR-binding peptide
  MOD_RES (14)..(15): Xaa is C or S
MIQMTINSTKVPAXXTS

SEQ ID NO: 4624 - protein, 20 aa, Artificial Sequence
  Non-cyclic GFR-binding peptide
  MOD_RES (14)..(15): Xaa is C or S
MIQMTINSTKVPAXXTSPVR

SEQ ID NO: 4625 - protein, 14 aa, Artificial Sequence
  Non-cyclic GFR-binding peptide
  MOD_RES (14)..(14): Xaa is C or S
MIQITINSLRTPVX

SEQ ID NO: 4626 - protein, 20 aa, Artificial Sequence
  Non-cyclic GFR-binding peptide
  MOD_RES (14)..(15): Xaa is C or S
MIQMTINSMKTPTXXPGASG

SEQ ID NO: 4627 - protein, 12 aa, Artificial Sequence
  Non-cyclic GFR-binding peptide
MIQMTINSTKVP

SEQ ID NO: 4628 - protein, 12 aa, Artificial Sequence
  Non-cyclic GFR-binding peptide
MIQITINSLRTP

SEQ ID NO: 4629 - protein, 19 aa, Artificial Sequence
  Non-cyclic GFR-binding peptide
  MOD_RES (14)..(15): Xaa is C or S
MIQITINSLRAPVXXSAPA

SEQ ID NO: 4630 - protein, 13 aa, Artificial Sequence
  Non-cyclic GFR-binding peptide
MIQITINSLRAPV

SEQ ID NO: 4631 - protein, 20 aa, Artificial Sequence
  Non-cyclic GFR-binding peptide
  MOD_RES (14)..(15): Xaa is C or S
MIQVTINSLKTPAXXPKPVH

SEQ ID NO: 4632 - protein, 17 aa, Artificial Sequence
  Non-cyclic GFR-binding peptide
  MOD_RES (14)..(15): Xaa is C or S
MIQITINSLRTPVXXTP

SEQ ID NO: 4633 - protein, 9 aa, Artificial Sequence
  Non-cyclic GFR-binding peptide
MIQMTINSM

SEQ ID NO: 4634 - protein, 12 aa, Artificial Sequence
  Non-cyclic GFR-binding peptide
MIQMTINSMKTP

SEQ ID NO: 4635 - protein, 20 aa, Artificial Sequence
  Non-cyclic GFR-binding peptide
  MOD_RES (14)..(15): Xaa is C or S
MIQITINSLRTPVXXTPPTS

SEQ ID NO: 4636 - protein, 14 aa, Artificial Sequence
  Non-cyclic GFR-binding peptide
  MOD_RES (14)..(14): Xaa is C or S
MIQITINSLRAPVX

SEQ ID NO: 4637 - protein, 18 aa, Artificial Sequence
  Non-cyclic GFR-binding peptide
  MOD_RES (14)..(15): Xaa is C or S
MIQITINSLRAPVXXSAP

SEQ ID NO: 4638 - protein, 19 aa, Artificial Sequence
  Non-cyclic GFR-binding peptide
  MOD_RES (14)..(15): Xaa is C or S
MIQMTINSMKTPTXXPGAS

SEQ ID NO: 4639 - protein, 11 aa, Artificial Sequence
  Non-cyclic GFR-binding peptide
MIQMTINSMKT

SEQ ID NO: 4640 - protein, 14 aa, Artificial Sequence
  Non-cyclic GFR-binding peptide
  MOD_RES (14)..(14): Xaa is C or S
MIQMTINSTKVPAX

SEQ ID NO: 4641 - protein, 20 aa, Artificial Sequence
  Non-cyclic GFR-binding peptide
  MOD_RES (14)..(15): Xaa is C or S
MIQITINSLRAPVXXSAPAA

SEQ ID NO: 4642 - protein, 11 aa, Artificial Sequence
  Non-cyclic GFR-binding peptide
MIQITINSLRT

SEQ ID NO: 4643 - protein, 19 aa, Artificial Sequence
  Non-cyclic GFR-binding peptide
  MOD_RES (5)..(6): Xaa is C or S
TPPTXXVPTRLSNITIQIM

SEQ ID NO: 4644 - protein, 14 aa, Artificial Sequence
  Non-cyclic GFR-binding peptide
  MOD_RES (1)..(1): Xaa is C or S
XTPTKMSNITMQIM

SEQ ID NO: 4645 - protein, 9 aa, Artificial Sequence
  Non-cyclic GFR-binding peptide
TSNITMQIM

SEQ ID NO: 4646 - protein, 16 aa, Artificial Sequence
  Non-cyclic GFR-binding peptide
  MOD_RES (2)..(3): Xaa is C or S
TXXAPVKTSNITMQIM

SEQ ID NO: 4647 - protein, 12 aa, Artificial Sequence
  Non-cyclic GFR-binding peptide
PARLSNITIQIM

SEQ ID NO: 4648 - protein, 10 aa, Artificial Sequence
  Non-cyclic GFR-binding peptide
RLSNITIQIM

SEQ ID NO: 4649 - protein, 11 aa, Artificial Sequence
  Non-cyclic GFR-binding peptide
ARLSNITIQIM

SEQ ID NO: 4650 - protein, 13 aa, Artificial Sequence
  Non-cyclic GFR-binding peptide
APVKTSNITMQIM

SEQ ID NO: 4651 - protein, 18 aa, Artificial Sequence
  Non-cyclic GFR-binding peptide
  MOD_RES (4)..(5): Xaa is C or S
AGPXXTPTKMSNITMQIM

SEQ ID NO: 4652 - protein, 16 aa, Artificial Sequence
  Non-cyclic GFR-binding peptide
  MOD_RES (2)..(3): Xaa is C or S
PXXTPTKMSNITMQIM

SEQ ID NO: 4653 - protein, 15 aa, Artificial Sequence
  Non-cyclic GFR-binding peptide
  MOD_RES (1)..(2): Xaa is C or S
XXVPARLSNITIQIM

SEQ ID NO: 4654 - protein, 13 aa, Artificial Sequence
  Non-cyclic GFR-binding peptide
VPTRLSNITIQIM

SEQ ID NO: 4655 - protein, 15 aa, Artificial Sequence
  Non-cyclic GFR-binding peptide
  MOD_RES (1)..(2): Xaa is C or S
XXTPTKMSNITMQIM

SEQ ID NO: 4656 - protein, 16 aa, Artificial Sequence
  Non-cyclic GFR-binding peptide
  MOD_RES (2)..(3): Xaa is C or S
SXXVPARLSNITIQIM

SEQ ID NO: 4657 - protein, 15 aa, Artificial Sequence
  Non-cyclic GFR-binding peptide
  MOD_RES (1)..(2): Xaa is C or S
XXAPVKTSNITMQIM

SEQ ID NO: 4658 - protein, 16 aa, Artificial Sequence
  Non-cyclic GFR-binding peptide
  MOD_RES (2)..(3): Xaa is C or S
TXXVPTRLSNITIQIM

SEQ ID NO: 4659 - protein, 15 aa, Artificial Sequence
  Non-cyclic GFR-binding peptide
  MOD_RES (1)..(2): Xaa is C or S
XXVPTRLSNITIQIM

SEQ ID NO: 4660 - protein, 18 aa, Artificial Sequence
  Non-cyclic GFR-binding peptide
  MOD_RES (4)..(5): Xaa is C or S
PPTXXVPTRLSNITIQIM

SEQ ID NO: 4661 - protein, 10 aa, Artificial Sequence
  Non-cyclic GFR-binding peptide
KMSNITMQIM

SEQ ID NO: 4662 - protein, 17 aa, Artificial Sequence
  Non-cyclic GFR-binding peptide
  MOD_RES (3)..(4): Xaa is C or S
GPXXTPTKMSNITMQIM

SEQ ID NO: 4663 - protein, 13 aa, Artificial Sequence
  Non-cyclic GFR-binding peptide
TPTKMSNITMQIM

SEQ ID NO: 4664 - protein, 19 aa, Artificial Sequence
  Non-cyclic GFR-binding peptide
  MOD_RES (5)..(6): Xaa is C or S
VPSTXXAPVKTSNITMQIM

SEQ ID NO: 4665 - protein, 10 aa, Artificial Sequence
  Non-cyclic GFR-binding peptide
KTSNITMQIM

SEQ ID NO: 4666 - protein, 11 aa, Artificial Sequence
  Non-cyclic GFR-binding peptide
VKTSNITMQIM

SEQ ID NO: 4667 - protein, 17 aa, Artificial Sequence
  Non-cyclic GFR-binding peptide
  MOD_RES (3)..(4): Xaa is C or S
ASXXVPARLSNITIQIM

SEQ ID NO: 4668 - protein, 18 aa, Artificial Sequence
  Non-cyclic GFR-binding peptide
  MOD_RES (4)..(5): Xaa is C or S
PSTXXAPVKTSNITMQIM

SEQ ID NO: 4669 - protein, 17 aa, Artificial Sequence
  Non-cyclic GFR-binding peptide
  MOD_RES (3)..(4): Xaa is C or S
STXXAPVKTSNITMQIM

SEQ ID NO: 4670 - protein, 20 aa, Artificial Sequence
  Non-cyclic GFR-binding peptide
  MOD_RES (6)..(7): Xaa is C or S
RVPSTXXAPVKTSNITMQIM

SEQ ID NO: 4671 - protein, 14 aa, Artificial Sequence
  Non-cyclic GFR-binding peptide
  MOD_RES (1)..(1): Xaa is C or S
XVPTRLSNITIQIM

SEQ ID NO: 4672 - protein, 20 aa, Artificial Sequence
  Non-cyclic GFR-binding peptide
  MOD_RES (6)..(7): Xaa is C or S
GSAGPXXTPTKMSNITMQIM

SEQ ID NO: 4673 - protein, 12 aa, Artificial Sequence
  Non-cyclic GFR-binding peptide
PVKTSNITMQIM

SEQ ID NO: 4674 - protein, 12 aa, Artificial Sequence
  Non-cyclic GFR-binding peptide
PTRLSNITIQIM

SEQ ID NO: 4675 - protein, 19 aa, Artificial Sequence
  Non-cyclic GFR-binding peptide
  MOD_RES (5)..(6): Xaa is C or S
APASXXVPARLSNITIQIM

SEQ ID NO: 4676 - protein, 13 aa, Artificial Sequence
  Non-cyclic GFR-binding peptide
VPARLSNITIQIM

SEQ ID NO: 4677 - protein, 20 aa, Artificial Sequence
  Non-cyclic GFR-binding peptide
  MOD_RES (6)..(7): Xaa is C or S
HVPKPXXAPTKLSNITVQIM

SEQ ID NO: 4678 - protein, 17 aa, Artificial Sequence
  Non-cyclic GFR-binding peptide
  MOD_RES (3)..(4): Xaa is C or S
PTXXVPTRLSNITIQIM

SEQ ID NO: 4679 - protein, 9 aa, Artificial Sequence
  Non-cyclic GFR-binding peptide
MSNITMQIM

SEQ ID NO: 4680 - protein, 12 aa, Artificial Sequence
  Non-cyclic GFR-binding peptide
PTKMSNITMQIM

SEQ ID NO: 4681 - protein, 20 aa, Artificial Sequence
  Non-cyclic GFR-binding peptide
  MOD_RES (6)..(7): Xaa is C or S
STPPTXXVPTRLSNITIQIM

SEQ ID NO: 4682 - protein, 14 aa, Artificial Sequence
  Non-cyclic GFR-binding peptide
  MOD_RES (1)..(1): Xaa is C or S
XVPARLSNITIQIM

SEQ ID NO: 4683 - protein, 18 aa, Artificial Sequence
  Non-cyclic GFR-binding peptide
  MOD_RES (4)..(5): Xaa is C or S
PASXXVPARLSNITIQIM

SEQ ID NO: 4684 - protein, 19 aa, Artificial Sequence
  Non-cyclic GFR-binding peptide
  MOD_RES (5)..(6): Xaa is C or S
SAGPXXTPTKMSNITMQIM

SEQ ID NO: 4685 - protein, 11 aa, Artificial Sequence
  Non-cyclic GFR-binding peptide
TKMSNITMQIM

SEQ ID NO: 4686 - protein, 14 aa, Artificial Sequence
  Non-cyclic GFR-binding peptide
  MOD_RES (1)..(1): Xaa is C or S
XAPVKTSNITMQIM

SEQ ID NO: 4687 - protein, 20 aa, Artificial Sequence
  Non-cyclic GFR-binding peptide
  MOD_RES (6)..(7): Xaa is C or S
AAPASXXVPARLSNITIQIM

SEQ ID NO: 4688 - protein, 11 aa, Artificial Sequence
  Non-cyclic GFR-binding peptide
TRLSNITIQIM

SEQ ID NO: 4689 - protein, 16 aa, Artificial Sequence
  Non-cyclic GFR-binding peptide
  MOD_RES (14)..(15): Xaa is C or S
LYLMSIASMKTPTXXP

SEQ ID NO: 4690 - protein, 13 aa, Artificial Sequence
  Non-cyclic GFR-binding peptide
LYLISIASLKTPV

SEQ ID NO: 4691 - protein, 15 aa, Artificial Sequence
  Non-cyclic GFR-binding peptide
  MOD_RES (14)..(15): Xaa is C or S
LYLISIASLRAPVXX

SEQ ID NO: 4692 - protein, 19 aa, Artificial Sequence
  Non-cyclic GFR-binding peptide
  MOD_RES (14)..(15): Xaa is C or S
LYLISIASMKEPVXXPEPI

SEQ ID NO: 4693 - protein, 14 aa, Artificial Sequence
  Non-cyclic GFR-binding peptide
  MOD_RES (14)..(14): Xaa is C or S
LYLISIASMKEPVX

SEQ ID NO: 4694 - protein, 18 aa, Artificial Sequence
  Non-cyclic GFR-binding peptide
  MOD_RES (14)..(15): Xaa is C or S
LYLISIASLRAPVXXSAP

SEQ ID NO: 4695 - protein, 18 aa, Artificial Sequence
  Non-cyclic GFR-binding peptide
  MOD_RES (14)..(15): Xaa is C or S
LYLISIASMKEPVXXPEP

SEQ ID NO: 4696 - protein, 18 aa, Artificial Sequence
  Non-cyclic GFR-binding peptide
  MOD_RES (14)..(15): Xaa is C or S
LYLMSIASMKTPTXXPGA

SEQ ID NO: 4697 - protein, 14 aa, Artificial Sequence
  Non-cyclic GFR-binding peptide
  MOD_RES (14)..(14): Xaa is C or S
LYLMSIASTKVPAX

SEQ ID NO: 4698 - protein, 10 aa, Artificial Sequence
  Non-cyclic GFR-binding peptide
LYLISIASLK

SEQ ID NO: 4699 - protein, 9 aa, Artificial Sequence
  Non-cyclic GFR-binding peptide
LYLMSIASM

SEQ ID NO: 4700 - protein, 20 aa, Artificial Sequence
  Non-cyclic GFR-binding peptide
  MOD_RES (14)..(15): Xaa is C or S
LYLMSIASTKVPAXXTSPVR

SEQ ID NO: 4701 - protein, 12 aa, Artificial Sequence
  Non-cyclic GFR-binding peptide
LYLISIASMKEP

SEQ ID NO: 4702 - protein, 13 aa, Artificial Sequence
  Non-cyclic GFR-binding peptide
LYLISIASLRAPV

SEQ ID NO: 4703 - protein, 20 aa, Artificial Sequence
  Non-cyclic GFR-binding peptide
  MOD_RES (14)..(15): Xaa is C or S
LYLVSIASLKTPAXXPKPVH

SEQ ID NO: 4704 - protein, 20 aa, Artificial Sequence
  Non-cyclic GFR-binding peptide
  MOD_RES (14)..(15): Xaa is C or S
LYLMSIASMKTPTXXPGASG

SEQ ID NO: 4705 - protein, 16 aa, Artificial Sequence
  Non-cyclic GFR-binding peptide
  MOD_RES (14)..(15): Xaa is C or S
LYLISIASLKTPVXXA

SEQ ID NO: 4706 - protein, 15 aa, Artificial Sequence
  Non-cyclic GFR-binding peptide
  MOD_RES (14)..(15): Xaa is C or S
LYLISIASMKEPVXX

SEQ ID NO: 4707 - protein, 11 aa, Artificial Sequence
  Non-cyclic GFR-binding peptide
LYLMSIASTKV

SEQ ID NO: 4708 - protein, 19 aa, Artificial Sequence
  Non-cyclic GFR-binding peptide
  MOD_RES (14)..(15): Xaa is C or S
LYLISIASLRAPVXXSAPA

SEQ ID NO: 4709 - protein, 19 aa, Artificial Sequence
  Non-cyclic GFR-binding peptide
  MOD_RES (14)..(15): Xaa is C or S
LYLMSIASTKVPAXXTSPV

SEQ ID NO: 4710 - protein, 13 aa, Artificial Sequence
  Non-cyclic GFR-binding peptide
LYLMSIASMKTPT

SEQ ID NO: 4711 - protein, 17 aa, Artificial Sequence
  Non-cyclic GFR-binding peptide
  MOD_RES (14)..(15): Xaa is C or S
LYLMSIASMKTPTXXPG

SEQ ID NO: 4712 - protein, 12 aa, Artificial Sequence
  Non-cyclic GFR-binding peptide
LYLISIASLKTP

SEQ ID NO: 4713 - protein, 13 aa, Artificial Sequence
  Non-cyclic GFR-binding peptide
LYLISIASMKEPV

SEQ ID NO: 4714 - protein, 10 aa, Artificial Sequence
  Non-cyclic GFR-binding peptide
LYLMSIASTK

SEQ ID NO: 4715 - protein, 15 aa, Artificial Sequence
  Non-cyclic GFR-binding peptide
  MOD_RES (14)..(15): Xaa is C or S
LYLMSIASMKTPTXX

SEQ ID NO: 4716 - protein, 9 aa, Artificial Sequence
  Non-cyclic GFR-binding peptide
LYLISIASM

SEQ ID NO: 4717 - protein, 14 aa, Artificial Sequence
  Non-cyclic GFR-binding peptide
  MOD_RES (14)..(14): Xaa is C or S
LYLISIASLKTPVX

SEQ ID NO: 4718 - protein, 10 aa, Artificial Sequence
  Non-cyclic GFR-binding peptide
LYLISIASMK

SEQ ID NO: 4719 - protein, 20 aa, Artificial Sequence
  Non-cyclic GFR-binding peptide
  MOD_RES (14)..(15): Xaa is C or S
LYLISIASMKEPVXXPEPIG

SEQ ID NO: 4720 - protein, 9 aa, Artificial Sequence
  Non-cyclic GFR-binding peptide
LYLMSIAST

SEQ ID NO: 4721 - protein, 11 aa, Artificial Sequence
  Non-cyclic GFR-binding peptide
LYLISIASLRA

SEQ ID NO: 4722 - protein, 20 aa, Artificial Sequence
  Non-cyclic GFR-binding peptide
  MOD_RES (14)..(15): Xaa is C or S
LYLISIASLRAPVXXSAPAA

SEQ ID NO: 4723 - protein, 16 aa, Artificial Sequence
  Non-cyclic GFR-binding peptide
  MOD_RES (14)..(15): Xaa is C or S
LYLISIASLRAPVXXS

SEQ ID NO: 4724 - protein, 17 aa, Artificial Sequence
  Non-cyclic GFR-binding peptide
  MOD_RES (14)..(15): Xaa is C or S
LYLISIASLKTPVXXAK

SEQ ID NO: 4725 - protein, 14 aa, Artificial Sequence
  Non-cyclic GFR-binding peptide
  MOD_RES (14)..(14): Xaa is C or S
LYLMSIASMKTPTX

SEQ ID NO: 4726 - protein, 12 aa, Artificial Sequence
  Non-cyclic GFR-binding peptide
LYLMSIASMKTP

SEQ ID NO: 4727 - protein, 20 aa, Artificial Sequence
  Non-cyclic GFR-binding peptide
  MOD_RES (14)..(15): Xaa is C or S
LYLISIASLKTPVXXAKSAK

SEQ ID NO: 4728 - protein, 11 aa, Artificial Sequence
  Non-cyclic GFR-binding peptide
LYLMSIASMKT

SEQ ID NO: 4729 - protein, 17 aa, Artificial Sequence
  Non-cyclic GFR-binding peptide
  MOD_RES (14)..(15): Xaa is C or S
LYLISIASLRAPVXXSA

SEQ ID NO: 4730 - protein, 12 aa, Artificial Sequence
  Non-cyclic GFR-binding peptide
LYLISIASLRAP

SEQ ID NO: 4731 - protein, 19 aa, Artificial Sequence
  Non-cyclic GFR-binding peptide
  MOD_RES (14)..(15): Xaa is C or S
LYLISIASLKTPVXXAKSA

SEQ ID NO: 4732 - protein, 14 aa, Artificial Sequence
  Non-cyclic GFR-binding peptide
  MOD_RES (14)..(14): Xaa is C or S
LYLISIASLRAPVX

SEQ ID NO: 4733 - protein, 19 aa, Artificial Sequence
  Non-cyclic GFR-binding peptide
  MOD_RES (14)..(15): Xaa is C or S
LYLMSIASMKTPTXXPGAS

SEQ ID NO: 4734 - protein, 16 aa, Artificial Sequence
  Non-cyclic GFR-binding peptide
  MOD_RES (14)..(15): Xaa is C or S
LYLISIASMKEPVXXP

SEQ ID NO: 4735 - protein, 10 aa, Artificial Sequence
  Non-cyclic GFR-binding peptide
LYLMSIASMK

SEQ ID NO: 4736 - protein, 15 aa, Artificial Sequence
  Non-cyclic GFR-binding peptide
  MOD_RES (14)..(15): Xaa is C or S
LYLISIASLKTPVXX

SEQ ID NO: 4737 - protein, 11 aa, Artificial Sequence
  Non-cyclic GFR-binding peptide
LYLISIASMKE

SEQ ID NO: 4738 - protein, 17 aa, Artificial Sequence
  Non-cyclic GFR-binding peptide
  MOD_RES (14)..(15): Xaa is C or S
LYLMSIASTKVPAXXTS

SEQ ID NO: 4739 - protein, 11 aa, Artificial Sequence
  Non-cyclic GFR-binding peptide
LYLISIASLKT

SEQ ID NO: 4740 - protein, 13 aa, Artificial Sequence
  Non-cyclic GFR-binding peptide
LYLMSIASTKVPA

SEQ ID NO: 4741 - protein, 12 aa, Artificial Sequence
  Non-cyclic GFR-binding peptide
LYLMSIASTKVP

SEQ ID NO: 4742 - protein, 18 aa, Artificial Sequence
  Non-cyclic GFR-binding peptide
  MOD_RES (14)..(15): Xaa is C or S
LYLMSIASTKVPAXXTSP

SEQ ID NO: 4743 - protein, 15 aa, Artificial Sequence
  Non-cyclic GFR-binding peptide
  MOD_RES (14)..(15): Xaa is C or S
LYLMSIASTKVPAXX

SEQ ID NO: 4744 - protein, 17 aa, Artificial Sequence
  Non-cyclic GFR-binding peptide
  MOD_RES (14)..(15): Xaa is C or S
LYLISIASMKEPVXXPE

SEQ ID NO: 4745 - protein, 18 aa, Artificial Sequence
  Non-cyclic GFR-binding peptide
  MOD_RES (14)..(15): Xaa is C or S
LYLISIASLKTPVXXAKS

SEQ ID NO: 4746 - protein, 16 aa, Artificial Sequence
  Non-cyclic GFR-binding peptide
  MOD_RES (14)..(15): Xaa is C or S
LYLMSIASTKVPAXXT

SEQ ID NO: 4747 - protein, 16 aa, Artificial Sequence
  Non-cyclic GFR-binding peptide
  MOD_RES (2)..(3): Xaa is C or S
PXXTPTKMSAISMLYL

SEQ ID NO: 4748 - protein, 13 aa, Artificial Sequence
  Non-cyclic GFR-binding peptide
VPTKLSAISILYL

SEQ ID NO: 4749 - protein, 15 aa, Artificial Sequence
  Non-cyclic GFR-binding peptide
  MOD_RES (1)..(2): Xaa is C or S
XXVPARLSAISILYL

SEQ ID NO: 4750 - protein, 19 aa, Artificial Sequence
  Non-cyclic GFR-binding peptide
  MOD_RES (5)..(6): Xaa is C or S
IPEPXXVPEKMSAISILYL

SEQ ID NO: 4751 - protein, 14 aa, Artificial Sequence
  Non-cyclic GFR-binding peptide
  MOD_RES (1)..(1): Xaa is C or S
XVPEKMSAISILYL

SEQ ID NO: 4752 - protein, 18 aa, Artificial Sequence
  Non-cyclic GFR-binding peptide
  MOD_RES (4)..(5): Xaa is C or S
PASXXVPARLSAISILYL

SEQ ID NO: 4753 - protein, 18 aa, Artificial Sequence
  Non-cyclic GFR-binding peptide
  MOD_RES (4)..(5): Xaa is C or S
PEPXXVPEKMSAISILYL

SEQ ID NO: 4754 - protein, 18 aa, Artificial Sequence
  Non-cyclic GFR-binding peptide
  MOD_RES (4)..(5): Xaa is C or S
AGPXXTPTKMSAISMLYL

SEQ ID NO: 4755 - protein, 14 aa, Artificial Sequence
  Non-cyclic GFR-binding peptide
  MOD_RES (1)..(1): Xaa is C or S
XAPVKTSAISMLYL

SEQ ID NO: 4756 - protein, 10 aa, Artificial Sequence
  Non-cyclic GFR-binding peptide
KLSAISILYL

SEQ ID NO: 4757 - protein, 9 aa, Artificial Sequence
  Non-cyclic GFR-binding peptide
MSAISMLYL

SEQ ID NO: 4758 - protein, 20 aa, Artificial Sequence
  Non-cyclic GFR-binding peptide
  MOD_RES (6)..(7): Xaa is C or S
RVPSTXXAPVKTSAISMLYL

SEQ ID NO: 4759 - protein, 12 aa, Artificial Sequence
  Non-cyclic GFR-binding peptide
PEKMSAISILYL

SEQ ID NO: 4760 - protein, 13 aa, Artificial Sequence
  Non-cyclic GFR-binding peptide
VPARLSAISILYL

SEQ ID NO: 4761 - protein, 20 aa, Artificial Sequence
  Non-cyclic GFR-binding peptide
  MOD_RES (6)..(7): Xaa is C or S
HVPKPXXAPTKLSAISVLYL

SEQ ID NO: 4762 - protein, 20 aa, Artificial Sequence
  Non-cyclic GFR-binding peptide
  MOD_RES (6)..(7): Xaa is C or S
GSAGPXXTPTKMSAISMLYL

SEQ ID NO: 4763 - protein, 16 aa, Artificial Sequence
  Non-cyclic GFR-binding peptide
  MOD_RES (2)..(3): Xaa is C or S
AXXVPTKLSAISILYL

SEQ ID NO: 4764 - protein, 15 aa, Artificial Sequence
  Non-cyclic GFR-binding peptide
  MOD_RES (1)..(2): Xaa is C or S
XXVPEKMSAISILYL

SEQ ID NO: 4765 - protein, 11 aa, Artificial Sequence
  Non-cyclic GFR-binding peptide
VKTSAISMLYL

SEQ ID NO: 4766 - protein, 19 aa, Artificial Sequence
  Non-cyclic GFR-binding peptide
  MOD_RES (5)..(6): Xaa is C or S
APASXXVPARLSAISILYL

SEQ ID NO: 4767 - protein, 19 aa, Artificial Sequence
  Non-cyclic GFR-binding peptide
  MOD_RES (5)..(6): Xaa is C or S
VPSTXXAPVKTSAISMLYL

SEQ ID NO: 4768 - protein, 13 aa, Artificial Sequence
  Non-cyclic GFR-binding peptide
TPTKMSAISMLYL

SEQ ID NO: 4769 - protein, 17 aa, Artificial Sequence
  Non-cyclic GFR-binding peptide
  MOD_RES (3)..(4): Xaa is C or S
GPXXTPTKMSAISMLYL

SEQ ID NO: 4770 - protein, 12 aa, Artificial Sequence
  Non-cyclic GFR-binding peptide
PTKLSAISILYL

SEQ ID NO: 4771 - protein, 13 aa, Artificial Sequence
  Non-cyclic GFR-binding peptide
VPEKMSAISILYL

SEQ ID NO: 4772 - protein, 10 aa, Artificial Sequence
  Non-cyclic GFR-binding peptide
KTSAISMLYL

SEQ ID NO: 4773 - protein, 15 aa, Artificial Sequence
  Non-cyclic GFR-binding peptide
  MOD_RES (1)..(2): Xaa is C or S
XXTPTKMSAISMLYL

SEQ ID NO: 4774 - protein, 9 aa, Artificial Sequence
  Non-cyclic GFR-binding peptide
MSAISILYL

SEQ ID NO: 4775 - protein, 14 aa, Artificial Sequence
  Non-cyclic GFR-binding peptide
  MOD_RES (1)..(1): Xaa is C or S
XVPTKLSAISILYL

SEQ ID NO: 4776 - protein, 10 aa, Artificial Sequence
  Non-cyclic GFR-binding peptide
KMSAISILYL

SEQ ID NO: 4777 - protein, 20 aa, Artificial Sequence
  Non-cyclic GFR-binding peptide
  MOD_RES (6)..(7): Xaa is C or S
GIPEPXXVPEKMSAISILYL

SEQ ID NO: 4778 - protein, 9 aa, Artificial Sequence
  Non-cyclic GFR-binding peptide
TSAISMLYL

SEQ ID NO: 4779 - protein, 11 aa, Artificial Sequence
  Non-cyclic GFR-binding peptide
ARLSAISILYL

SEQ ID NO: 4780 - protein, 20 aa, Artificial Sequence
  Non-cyclic GFR-binding peptide
  MOD_RES (6)..(7): Xaa is C or S
AAPASXXVPARLSAISILYL

SEQ ID NO: 4781 - protein, 16 aa, Artificial Sequence
  Non-cyclic GFR-binding peptide
  MOD_RES (2)..(3): Xaa is C or S
SXXVPARLSAISILYL

SEQ ID NO: 4782 - protein, 17 aa, Artificial Sequence
  Non-cyclic GFR-binding peptide
  MOD_RES (3)..(4): Xaa is C or S
KAXXVPTKLSAISILYL

SEQ ID NO: 4783 - protein, 14 aa, Artificial Sequence
  Non-cyclic GFR-binding peptide
  MOD_RES (1)..(1): Xaa is C or S
XTPTKMSAISMLYL

SEQ ID NO: 4784 - protein, 12 aa, Artificial Sequence
  Non-cyclic GFR-binding peptide
PTKMSAISMLYL

SEQ ID NO: 4785 - protein, 20 aa, Artificial Sequence
  Non-cyclic GFR-binding peptide
  MOD_RES (6)..(7): Xaa is C or S
KASKAXXVPTKLSAISILYL

SEQ ID NO: 4786 - protein, 11 aa, Artificial Sequence
  Non-cyclic GFR-binding peptide
TKMSAISMLYL

SEQ ID NO: 4787 - protein, 17 aa, Artificial Sequence
  Non-cyclic GFR-binding peptide
  MOD_RES (3)..(4): Xaa is C or S
ASXXVPARLSAISILYL

SEQ ID NO: 4788 - protein, 12 aa, Artificial Sequence
  Non-cyclic GFR-binding peptide
PARLSAISILYL

SEQ ID NO: 4789 - protein, 19 aa, Artificial Sequence
  Non-cyclic GFR-binding peptide
  MOD_RES (5)..(6): Xaa is C or S
ASKAXXVPTKLSAISILYL

SEQ ID NO: 4790 - protein, 14 aa, Artificial Sequence
  Non-cyclic GFR-binding peptide
  MOD_RES (1)..(1): Xaa is C or S
XVPARLSAISILYL

SEQ ID NO: 4791 - protein, 19 aa, Artificial Sequence
  Non-cyclic GFR-binding peptide
  MOD_RES (5)..(6): Xaa is C or S
SAGPXXTPTKMSAISMLYL

SEQ ID NO: 4792 - protein, 16 aa, Artificial Sequence
  Non-cyclic GFR-binding peptide
  MOD_RES (2)..(3): Xaa is C or S
PXXVPEKMSAISILYL

SEQ ID NO: 4793 - protein, 10 aa, Artificial Sequence
  Non-cyclic GFR-binding peptide
KMSAISMLYL

SEQ ID NO: 4794 - protein, 15 aa, Artificial Sequence
  Non-cyclic GFR-binding peptide
  MOD_RES (1)..(2): Xaa is C or S
XXVPTKLSAISILYL

SEQ ID NO: 4795 - protein, 11 aa, Artificial Sequence
  Non-cyclic GFR-binding peptide
EKMSAISILYL

SEQ ID NO: 4796 - protein, 17 aa, Artificial Sequence
  Non-cyclic GFR-binding peptide
  MOD_RES (3)..(4): Xaa is C or S
STXXAPVKTSAISMLYL

SEQ ID NO: 4797 - protein, 11 aa, Artificial Sequence
  Non-cyclic GFR-binding peptide
TKLSAISILYL

SEQ ID NO: 4798 - protein, 13 aa, Artificial Sequence
  Non-cyclic GFR-binding peptide
APVKTSAISMLYL

SEQ ID NO: 4799 - protein, 12 aa, Artificial Sequence
  Non-cyclic GFR-binding peptide
PVKTSAISMLYL

SEQ ID NO: 4800 - protein, 18 aa, Artificial Sequence
  Non-cyclic GFR-binding peptide
  MOD_RES (4)..(5): Xaa is C or S
PSTXXAPVKTSAISMLYL

SEQ ID NO: 4801 - protein, 15 aa, Artificial Sequence
  Non-cyclic GFR-binding peptide
  MOD_RES (1)..(2): Xaa is C or S
XXAPVKTSAISMLYL

SEQ ID NO: 4802 - protein, 17 aa, Artificial Sequence
  Non-cyclic GFR-binding peptide
  MOD_RES (3)..(4): Xaa is C or S
EPXXVPEKMSAISILYL

SEQ ID NO: 4803 - protein, 18 aa, Artificial Sequence
  Non-cyclic GFR-binding peptide
  MOD_RES (4)..(5): Xaa is C or S
SKAXXVPTKLSAISILYL

SEQ ID NO: 4804 - protein, 16 aa, Artificial Sequence
  Non-cyclic GFR-binding peptide
  MOD_RES (2)..(3): Xaa is C or S
TXXAPVKTSAISMLYL

SEQ ID NO: 4805 - protein, 24 aa, Artificial Sequence
  Cyclic GFR-binding peptide
DEYDKSAISTLYLDEYDKGGGGGG

SEQ ID NO: 4806 - protein, 20 aa, Artificial Sequence
  Cyclic GFR-binding peptide
GTPGPSAISTLYLDDMGVGG

SEQ ID NO: 4807 - protein, 24 aa, Artificial Sequence
  Cyclic GFR-binding peptide
IGKTPSAISTLYLIGKTPGGGGGG

SEQ ID NO: 4808 - protein, 19 aa, Artificial Sequence
  Cyclic GFR-binding peptide
NAISVLYFDENEKGGGGGG

SEQ ID NO: 4809 - protein, 24 aa, Artificial Sequence
  Cyclic GFR-binding peptide
DSSNNSATSVLYYDSSNNGGGGGG

SEQ ID NO: 4810 - protein, 23 aa, Artificial Sequence
  Cyclic GFR-binding peptide
SAISTLYLEIVRKKPLAAAAAAA

SEQ ID NO: 4811 - protein, 16 aa, Artificial Sequence
  Cyclic GFR-binding peptide
NAISVLYFGGGGGGGG

SEQ ID NO: 4812 - protein, 19 aa, Artificial Sequence
  Cyclic GFR-binding peptide
SATSVLYYGGGLRKHRGGG

SEQ ID NO: 4813 - protein, 26 aa, Artificial Sequence
  Cyclic GFR-binding peptide
WWFWGGGSAISTLYLIGKTPGGGGGG

SEQ ID NO: 4814 - protein, 27 aa, Artificial Sequence
  Cyclic GFR-binding peptide
GTPGPGGGSAISTLYLIGKTPGGGGGG

SEQ ID NO: 4815 - protein, 27 aa, Artificial Sequence
  Cyclic GFR-binding peptide
GTPGPGGGNAISVLYFDENEKGGGGGG

SEQ ID NO: 4816 - protein, 21 aa, Artificial Sequence
  Cyclic GFR-binding peptide
GTPGPGGGSAISMLYLGGGGG

SEQ ID NO: 4817 - protein, 21 aa, Artificial Sequence
  Cyclic GFR-binding peptide
GTPGPSPISTLYKGGGGGGGG

SEQ ID NO: 4818 - protein, 26 aa, Artificial Sequence
  Cyclic GFR-binding peptide
GTPGPGGNAISMLYFVGRKPGGGGGG

SEQ ID NO: 4819 - protein, 26 aa, Artificial Sequence
  Cyclic GFR-binding peptide
GTPGPGGNAISTLYLDENEKGGGGGG

SEQ ID NO: 4820 - protein, 26 aa, Artificial Sequence
  Cyclic GFR-binding peptide
GTPGPGGSAISTLYLDDSSNGGGGGG

SEQ ID NO: 4821 - protein, 26 aa, Artificial Sequence
  Cyclic GFR-binding peptide
GTPGPGGNAISTLYLDDSSNGGGGGG

SEQ ID NO: 4822 - protein, 22 aa, Artificial Sequence
  Cyclic GFR-binding peptide
GTPGPGGSAISTLYLGGGGGGG

SEQ ID NO: 4823 - protein, 26 aa, Artificial Sequence
  Cyclic GFR-binding peptide
WWFWGGGSAISTLYLDEYDKGGGGGG

SEQ ID NO: 4824 - protein, 20 aa, Artificial Sequence
  Cyclic GFR-binding peptide
GTPGPSAISTLYLGGGGGGG

SEQ ID NO: 4825 - protein, 26 aa, Artificial Sequence
  Cyclic GFR-binding peptide
GTPGPGGSATSVLYYDDSSNGGGGGG

SEQ ID NO: 4826 - protein, 21 aa, Artificial Sequence
  Cyclic GFR-binding peptide
GTPGPGGSAISMLYLGGGGGG

SEQ ID NO: 4827 - protein, 25 aa, Artificial Sequence
  Cyclic GFR-binding peptide
VGRKPELEPLPIVYYVGRKPGGGGG

SEQ ID NO: 4828 - protein, 21 aa, Artificial Sequence
  Cyclic GFR-binding peptide
EPLPIVYYVGRTPKVGGGGGG

SEQ ID NO: 4829 - protein, 19 aa, Artificial Sequence
  Cyclic GFR-binding peptide
EPLPIVYYVGRTPGGGGGG

SEQ ID NO: 4830 - protein, 23 aa, Artificial Sequence
  Cyclic GFR-binding peptide
RSVKVAKVRIKPHQGQHGGGGGG

SEQ ID NO: 4831 - protein, 20 aa, Artificial Sequence
  Cyclic GFR-binding peptide
SNITMQIMRIKPHQGGGGGG

SEQ ID NO: 4832 - protein, 24 aa, Artificial Sequence
  Cyclic GFR-binding peptide
EYVRKRPVQVRKIEYVRKGGGGGG

SEQ ID NO: 4833 - protein, 24 aa, Artificial Sequence
  Cyclic GFR-binding peptide
DENKNSSLSILFFDENKNGGGGGG

SEQ ID NO: 4834 - protein, 24 aa, Artificial Sequence
  Cyclic GFR-binding peptide
DENEKSSLSILFFDENEKGGGGGG

SEQ ID NO: 4835 - protein, 24 aa, Artificial Sequence
  Cyclic GFR-binding peptide
DAANNSPISILYIDAANNGGGGGG

SEQ ID NO: 4836 - protein, 16 aa, Artificial Sequence
  Cyclic GFR-binding peptide
SPISILYIGGGGGGGG

SEQ ID NO: 4837 - protein, 24 aa, Artificial Sequence
  Cyclic GFR-binding peptide
DDSSNSPISLLYIDAANNGGGGGG

SEQ ID NO: 4838 - protein, 15 aa, Artificial Sequence
  Cyclic GFR-binding peptide
NAISVLYFGGGGGGG

SEQ ID NO: 4839 - protein, 21 aa, Artificial Sequence
  Cyclic GFR-binding peptide
EPLPIVYYVGRKPKVGGGGGG

SEQ ID NO: 4840 - protein, 19 aa, Artificial Sequence
  Cyclic GFR-binding peptide
EPLPIVYYDDSSNGGGGGG

SEQ ID NO: 4841 - protein, 21 aa, Artificial Sequence
  Cyclic GFR-binding peptide
EPLPIVYYDDSSNGGGGGGGG

SEQ ID NO: 4842 - protein, 19 aa, Artificial Sequence
  Cyclic GFR-binding peptide
SPISILYIDAANNGGGGGG

SEQ ID NO: 4843 - protein, 19 aa, Artificial Sequence
  Cyclic GFR-binding peptide
NAISTLYFDDSSNGGGGGG

SEQ ID NO: 4844 - protein, 23 aa, Artificial Sequence
  Cyclic GFR-binding peptide
KLSAISTLYLEIVRKKPGGGGGG

SEQ ID NO: 4845 - protein, 19 aa, Artificial Sequence
  Cyclic GFR-binding peptide
SPINMLYFNEKNQGGGGGG

SEQ ID NO: 4846 - protein, 19 aa, Artificial Sequence
  Cyclic GFR-binding peptide
EPLPIVYYDDSSNGGGGGG

SEQ ID NO: 4847 - protein, 16 aa, Artificial Sequence
  Cyclic GFR-binding peptide
SAISMLFLGGGGGGGG

SEQ ID NO: 4848 - protein, 19 aa, Artificial Sequence
  Cyclic GFR-binding peptide
SPINILFFDENKNGGGGGG

SEQ ID NO: 4849 - protein, 19 aa, Artificial Sequence
  Cyclic GFR-binding peptide
SNITMQIMIGKTPGGGGGG

SEQ ID NO: 4850 - protein, 19 aa, Artificial Sequence
  Cyclic GFR-binding peptide
SAISTLYLIGKTPKILKNY

SEQ ID NO: 4851 - protein, 24 aa, Artificial Sequence
  Cyclic GFR-binding peptide
WWFWGSAISTLYLIGKTPKILKNY

SEQ ID NO: 4852 - protein, 24 aa, Artificial Sequence
  Cyclic GFR-binding peptide
GTPGPSAISTLYLIGKTPKILKNY

SEQ ID NO: 4853 - protein, 21 aa, Artificial Sequence
  Cyclic GFR-binding peptide
EPLPIVYYVGRTPKVEQLSGG

SEQ ID NO: 4854 - protein, 24 aa, Artificial Sequence
  Cyclic GFR-binding peptide
GGGGGGKDYEDLYLTSIASKDYED

SEQ ID NO: 4855 - protein, 20 aa, Artificial Sequence
  Cyclic GFR-binding peptide
GGVGMDDLYLTSIASPGPTG

SEQ ID NO: 4856 - protein, 24 aa, Artificial Sequence
  Cyclic GFR-binding peptide
GGGGGGPTKGILYLTSIASPTKGI

SEQ ID NO: 4857 - protein, 19 aa, Artificial Sequence
  Cyclic GFR-binding peptide
GGGGGGKENEDFYLVSIAN

SEQ ID NO: 4858 - protein, 24 aa, Artificial Sequence
  Cyclic GFR-binding peptide
GGGGGGNNSSDYYLVSTASNNSSD

SEQ ID NO: 4859 - protein, 23 aa, Artificial Sequence
  Cyclic GFR-binding peptide
AAAAAAALPKKRVIELYLTSIAS

SEQ ID NO: 4860 - protein, 16 aa, Artificial Sequence
  Cyclic GFR-binding peptide
GGGGGGGGFYLVSIAN

SEQ ID NO: 4861 - protein, 19 aa, Artificial Sequence
  Cyclic GFR-binding peptide
GGGRHKRLGGGYYLVSTAS

SEQ ID NO: 4862 - protein, 26 aa, Artificial Sequence
  Cyclic GFR-binding peptide
GGGGGGPTKGILYLTSIASGGGWFWW

SEQ ID NO: 4863 - protein, 27 aa, Artificial Sequence
  Cyclic GFR-binding peptide
GGGGGGPTKGILYLTSIASGGGPGPTG

SEQ ID NO: 4864 - protein, 27 aa, Artificial Sequence
  Cyclic GFR-binding peptide
GGGGGGKENEDFYLVSIANGGGPGPTG

SEQ ID NO: 4865 - protein, 21 aa, Artificial Sequence
  Cyclic GFR-binding peptide
GGGGGLYLMSIASGGGPGPTG

SEQ ID NO: 4866 - protein, 21 aa, Artificial Sequence
  Cyclic GFR-binding peptide
GGGGGGGGKYLTSIPSPGPTG

SEQ ID NO: 4867 - protein, 26 aa, Artificial Sequence
  Cyclic GFR-binding peptide
GGGGGGPKRGVFYLMSIANGGPGPTG

SEQ ID NO: 4868 - protein, 26 aa, Artificial Sequence
  Cyclic GFR-binding peptide
GGGGGGKENEDLYLTSIANGGPGPTG

SEQ ID NO: 4869 - protein, 26 aa, Artificial Sequence
  Cyclic GFR-binding peptide
GGGGGGNSSDDLYLTSIASGGPGPTG

SEQ ID NO: 4870 - protein, 26 aa, Artificial Sequence
  Cyclic GFR-binding peptide
GGGGGGNSSDDLYLTSIANGGPGPTG

SEQ ID NO: 4871 - protein, 22 aa, Artificial Sequence
  Cyclic GFR-binding peptide
GGGGGGGLYLTSIASGGPGPTG

SEQ ID NO: 4872 - protein, 26 aa, Artificial Sequence
  Cyclic GFR-binding peptide
GGGGGGKDYEDLYLTSIASGGGWFWW

SEQ ID NO: 4873 - protein, 20 aa, Artificial Sequence
  Cyclic GFR-binding peptide
GGGGGGGLYLTSIASPGPTG

SEQ ID NO: 4874 - protein, 26 aa, Artificial Sequence
  Cyclic GFR-binding peptide
GGGGGGNSSDDYYLVSTASGGPGPTG

SEQ ID NO: 4875 - protein, 21 aa, Artificial Sequence
  Cyclic GFR-binding peptide
GGGGGGLYLMSIASGGPGPTG

SEQ ID NO: 4876 - protein, 25 aa, Artificial Sequence
  Cyclic GFR-binding peptide
GGGGGPKRGVYYVIPLPELEPKRGV

SEQ ID NO: 4877 - protein, 21 aa, Artificial Sequence
  Cyclic GFR-binding peptide
GGGGGGVKPTRGVYYVIPLPE

SEQ ID NO: 4878 - protein, 19 aa, Artificial Sequence
  Cyclic GFR-binding peptide
GGGGGGPTRGVYYVIPLPE

SEQ ID NO: 4879 - protein, 23 aa, Artificial Sequence
  Cyclic GFR-binding peptide
GGGGGGHQGQHPKIRVKAVKVSR

SEQ ID NO: 4880 - protein, 20 aa, Artificial Sequence
  Cyclic GFR-binding peptide
GGGGGGQHPKIRMIQMTINS

SEQ ID NO: 4881 - protein, 24 aa, Artificial Sequence
  Cyclic GFR-binding peptide
GGGGGGKRVYEIKRVQVPRKRVYE

SEQ ID NO: 4882 - protein, 24 aa, Artificial Sequence
  Cyclic GFR-binding peptide
GGGGGGNKNEDFFLISLSSNKNED

SEQ ID NO: 4883 - protein, 24 aa, Artificial Sequence
  Cyclic GFR-binding peptide
GGGGGGKENEDFFLISLSSKENED

SEQ ID NO: 4884 - protein, 24 aa, Artificial Sequence
  Cyclic GFR-binding peptide
GGGGGGNNAADIYLISIPSNNAAD

SEQ ID NO: 4885 - protein, 16 aa, Artificial Sequence
  Cyclic GFR-binding peptide
GGGGGGGGIYLISIPS

SEQ ID NO: 4886 - protein, 24 aa, Artificial Sequence
  Cyclic GFR-binding peptide
GGGGGGNNAADIYLLSIPSNSSDD

SEQ ID NO: 4887 - protein, 15 aa, Artificial Sequence
  Cyclic GFR-binding peptide
GGGGGGGFYLVSIAN

SEQ ID NO: 4888 - protein, 21 aa, Artificial Sequence
  Cyclic GFR-binding peptide
GGGGGGVKPKRGVYYVIPLPE

SEQ ID NO: 4889 - protein, 19 aa, Artificial Sequence
  Cyclic GFR-binding peptide
GGGGGGNSSDDYYVIPLPE

SEQ ID NO: 4890 - protein, 21 aa, Artificial Sequence
  Cyclic GFR-binding peptide
GGGGGGGGNSSDDYYVIPLPE

SEQ ID NO: 4891 - protein, 19 aa, Artificial Sequence
  Cyclic GFR-binding peptide
GGGGGGNNAADIYLISIPS

SEQ ID NO: 4892 - protein, 19 aa, Artificial Sequence
  Cyclic GFR-binding peptide
GGGGGGNSSDDFYLTSIAN

SEQ ID NO: 4893 - protein, 23 aa, Artificial Sequence
  Cyclic GFR-binding peptide
GGGGGGPKKRVIELYLTSIASLK

SEQ ID NO: 4894 - protein, 19 aa, Artificial Sequence
  Cyclic GFR-binding peptide
GGGGGGQNKENFYLMNIPS

SEQ ID NO: 4895 - protein, 19 aa, Artificial Sequence
  Cyclic GFR-binding peptide
GGGGGGNSSDDYYVIPLPE

SEQ ID NO: 4896 - protein, 16 aa, Artificial Sequence
  Cyclic GFR-binding peptide
GGGGGGGGLFLMSIAS

SEQ ID NO: 4897 - protein, 19 aa, Artificial Sequence
  Cyclic GFR-binding peptide
GGGGGGNKNEDFFLINIPS

SEQ ID NO: 4898 - protein, 19 aa, Artificial Sequence
  Cyclic GFR-binding peptide
GGGGGGPTKGIMIQMTINS

SEQ ID NO: 4899 - protein, 19 aa, Artificial Sequence
  Cyclic GFR-binding peptide
YNKLIKPTKGILYLTSIAS

SEQ ID NO: 4900 - protein, 24 aa, Artificial Sequence
  Cyclic GFR-binding peptide
YNKLIKPTKGILYLTSIASGWFWW

SEQ ID NO: 4901 - protein, 24 aa, Artificial Sequence
  Cyclic GFR-binding peptide
YNKLIKPTKGILYLTSIASPGPTG

SEQ ID NO: 4902 - protein, 21 aa, Artificial Sequence
  Cyclic GFR-binding peptide
GGSLQEVKPTRGVYYVIPLPE

SEQ ID NO: 4903 - protein, 27 aa, Artificial Sequence
  Cyclic GFR-binding peptide
WWFWGVPTKMSAISMLYLDENEKGGGG

SEQ ID NO: 4904 - protein, 29 aa, Artificial Sequence
  Cyclic GFR-binding peptide
GTPGPVPTKLSAISMLYLDENKNGGGGGG

SEQ ID NO: 4905 - protein, 28 aa, Artificial Sequence
  Cyclic GFR-binding peptide
WWFWGGVPTQLSAISMLYLDEYDKAAAA

SEQ ID NO: 4906 - protein, 30 aa, Artificial Sequence
  Cyclic GFR-binding peptide
GTPGPGVPTRLSAISMLYLDDSSNAAAAAA

SEQ ID NO: 4907 - protein, 29 aa, Artificial Sequence
  Cyclic GFR-binding peptide
WWFWGGGVPTKTSAISMLYLDDSSNGGGG

SEQ ID NO: 4908 - protein, 31 aa, Artificial Sequence
  Cyclic GFR-binding peptide
GTPGPGGVPTALSAISMLYLDDSSNGGGGGG

SEQ ID NO: 4909 - protein, 30 aa, Artificial Sequence
  Cyclic GFR-binding peptide
WWFWGGGGVPTDLSAISMLYLDSSNNAAAA

SEQ ID NO: 4910 - protein, 32 aa, Artificial Sequence
  Cyclic GFR-binding peptide
GTPGPGGGVPEKMSAISMLYLDDMGVAAAAAA

SEQ ID NO: 4911 - protein, 27 aa, Artificial Sequence
  Cyclic GFR-binding peptide
WWFWGAPTKLSAISMLYLDKGVVGGGG

SEQ ID NO: 4912 - protein, 29 aa, Artificial Sequence
  Cyclic GFR-binding peptide
GTPGPAPTQLSAISMLYLNDKQQGGGGGG

SEQ ID NO: 4913 - protein, 28 aa, Artificial Sequence
  Cyclic GFR-binding peptide
WWFWGGTPTKMSAISMLYLDAANNAAAA

SEQ ID NO: 4914 - protein, 30 aa, Artificial Sequence
  Cyclic GFR-binding peptide
GTPGPGVPARLSAISMLYLDSANNAAAAAA

SEQ ID NO: 4915 - protein, 29 aa, Artificial Sequence
  Cyclic GFR-binding peptide
WWFWGGGAPVKTSAISMLYLDDSSNGGGG

SEQ ID NO: 4916 - protein, 31 aa, Artificial Sequence
  Cyclic GFR-binding peptide
GTPGPGGVPQALSAISMLYLDNGRVGGGGGG

SEQ ID NO: 4917 - protein, 30 aa, Artificial Sequence
  Cyclic GFR-binding peptide
WWFWGGGGVSQDLSAISMLYLVGRKPAAAA

SEQ ID NO: 4918 - protein, 32 aa, Artificial Sequence
  Cyclic GFR-binding peptide
GTPGPGGGVPQDLSAISMLYLIGKTPAAAAAA

SEQ ID NO: 4919 - protein, 27 aa, Artificial Sequence
  Cyclic GFR-binding peptide
WWFWGSRVHHSAISMLYLVGRTPGGGG

SEQ ID NO: 4920 - protein, 29 aa, Artificial Sequence
  Cyclic GFR-binding peptide
GTPGPTQVQLSAISMLYLRIKPHGGGGGG

SEQ ID NO: 4921 - protein, 28 aa, Artificial Sequence
  Cyclic GFR-binding peptide
WWFWGGVPEELSSLSILFFRIKPHAAAA

SEQ ID NO: 4922 - protein, 30 aa, Artificial Sequence
  Cyclic GFR-binding peptide
GTPGPGVPEKLSSLSILFFRIKPHAAAAAA

SEQ ID NO: 4923 - protein, 29 aa, Artificial Sequence
  Cyclic GFR-binding peptide
WWFWGGGVPEQLSSLSILFFRIKPHGGGG

SEQ ID NO: 4924 - protein, 31 aa, Artificial Sequence
  Cyclic GFR-binding peptide
GTPGPGGVPEKMSSLSILFFEYVRKGGGGGG

SEQ ID NO: 4925 - protein, 30 aa, Artificial Sequence
  Cyclic GFR-binding peptide
WWFWGGGGVPERLSSLSILFFEIVRKAAAA

SEQ ID NO: 4926 - protein, 30 aa, Artificial Sequence
  Cyclic GFR-binding peptide
GTPGPGGGVPEKTSSLSILFFDENEKGGGG

SEQ ID NO: 4927 - protein, 29 aa, Artificial Sequence
  Cyclic GFR-binding peptide
WWFWGVPEALSSLSILFFDENKNGGGGGG

SEQ ID NO: 4928 - protein, 27 aa, Artificial Sequence
  Cyclic GFR-binding peptide
GTPGPVPEDLSSLSILFFDEYDKAAAA

SEQ ID NO: 4929 - protein, 30 aa, Artificial Sequence
  Cyclic GFR-binding peptide
WWFWGGVPTELSSLSILFFDDSSNAAAAAA

SEQ ID NO: 4930 - protein, 28 aa, Artificial Sequence
  Cyclic GFR-binding peptide
GTPGPGAPTKLSSLSILFFDDSSNGGGG

SEQ ID NO: 4931 - protein, 31 aa, Artificial Sequence
  Cyclic GFR-binding peptide
WWFWGGGAPTQLSSLSILFFDDSSNGGGGGG

SEQ ID NO: 4932 - protein, 29 aa, Artificial Sequence
  Cyclic GFR-binding peptide
GTPGPGGVPTKLSSLSILFFDSSNNAAAA

SEQ ID NO: 4933 - protein, 32 aa, Artificial Sequence
  Cyclic GFR-binding peptide
WWFWGGGGTPTKMSSLSILFFDDMGVAAAAAA

SEQ ID NO: 4934 - protein, 30 aa, Artificial Sequence
  Cyclic GFR-binding peptide
GTPGPGGGVPARLSSLSILFFDKGVVGGGG

SEQ ID NO: 4935 - protein, 29 aa, Artificial Sequence
  Cyclic GFR-binding peptide
WWFWGVPTRLSSLSILFFNDKQQGGGGGG

SEQ ID NO: 4936 - protein, 27 aa, Artificial Sequence
  Cyclic GFR-binding peptide
GTPGPAPVKTSSLSILFFDAANNAAAA

SEQ ID NO: 4937 - protein, 30 aa, Artificial Sequence
  Cyclic GFR-binding peptide
WWFWGGVPQALSSLSILFFDSANNAAAAAA

SEQ ID NO: 4938 - protein, 28 aa, Artificial Sequence
  Cyclic GFR-binding peptide
GTPGPGVSQDLSSLSILFFDDSSNGGGG

SEQ ID NO: 4939 - protein, 31 aa, Artificial Sequence
  Cyclic GFR-binding peptide
WWFWGGGVPQDLSSLSILFFDNGRVGGGGGG

SEQ ID NO: 4940 - protein, 29 aa, Artificial Sequence
  Cyclic GFR-binding peptide
GTPGPGGVPTEESSLSILFFVGRKPAAAA

SEQ ID NO: 4941 - protein, 32 aa, Artificial Sequence
  Cyclic GFR-binding peptide
WWFWGGGGVPTGQSSLSILFFIGKTPAAAAAA

SEQ ID NO: 4942 - protein, 30 aa, Artificial Sequence
  Cyclic GFR-binding peptide
GTPGPGGGSRVHHSSLSILFFVGRTPGGGG

SEQ ID NO: 4943 - protein, 29 aa, Artificial Sequence
  Cyclic GFR-binding peptide
WWFWGTQVQLSSLSILFFRIKPHGGGGGG

SEQ ID NO: 4944 - protein, 27 aa, Artificial Sequence
  Cyclic GFR-binding peptide
GTPGPAPTELNAISVLYFRIKPHAAAA

SEQ ID NO: 4945 - protein, 30 aa, Artificial Sequence
  Cyclic GFR-binding peptide
WWFWGGAPTKMNAISVLYFRIKPHAAAAAA

SEQ ID NO: 4946 - protein, 28 aa, Artificial Sequence
  Cyclic GFR-binding peptide
GTPGPGAPTKLNAISVLYFRIKPHGGGG

SEQ ID NO: 4947 - protein, 31 aa, Artificial Sequence
  Cyclic GFR-binding peptide
WWFWGGGAPTRLNAISVLYFEYVRKGGGGGG

SEQ ID NO: 4948 - protein, 29 aa, Artificial Sequence
  Cyclic GFR-binding peptide
GTPGPGGAPTKTNAISVLYFEIVRKAAAA

SEQ ID NO: 4949 - protein, 30 aa, Artificial Sequence
  Cyclic GFR-binding peptide
WWFWGGGGAPTALNAISVLYFDENEKGGGG

SEQ ID NO: 4950 - protein, 32 aa, Artificial Sequence
  Cyclic GFR-binding peptide
GTPGPGGGAPTDLNAISVLYFDENKNGGGGGG

SEQ ID NO: 4951 - protein, 27 aa, Artificial Sequence
  Cyclic GFR-binding peptide
WWFWGVPTELNAISVLYFDEYDKAAAA

SEQ ID NO: 4952 - protein, 29 aa, Artificial Sequence
  Cyclic GFR-binding peptide
GTPGPVPEKMNAISVLYFDDSSNAAAAAA

SEQ ID NO: 4953 - protein, 28 aa, Artificial Sequence
  Cyclic GFR-binding peptide
WWFWGGVPTKLNAISVLYFDDSSNGGGG

SEQ ID NO: 4954 - protein, 30 aa, Artificial Sequence
  Cyclic GFR-binding peptide
GTPGPGTPTKMNAISVLYFDDSSNGGGGGG

SEQ ID NO: 4955 - protein, 29 aa, Artificial Sequence
  Cyclic GFR-binding peptide
WWFWGGGVPARLNAISVLYFDSSNNAAAA

SEQ ID NO: 4956 - protein, 31 aa, Artificial Sequence
  Cyclic GFR-binding peptide
GTPGPGGVPTRLNAISVLYFDDMGVAAAAAA

SEQ ID NO: 4957 - protein, 30 aa, Artificial Sequence
  Cyclic GFR-binding peptide
WWFWGGGGAPVKTNAISVLYFDKGVVGGGG

SEQ ID NO: 4958 - protein, 32 aa, Artificial Sequence
  Cyclic GFR-binding peptide
GTPGPGGGVPQALNAISVLYFNDKQQGGGGGG

SEQ ID NO: 4959 - protein, 27 aa, Artificial Sequence
  Cyclic GFR-binding peptide
WWFWGVSQDLNAISVLYFDAANNAAAA

SEQ ID NO: 4960 - protein, 29 aa, Artificial Sequence
  Cyclic GFR-binding peptide
GTPGPVPQDLNAISVLYFDSANNAAAAAA

SEQ ID NO: 4961 - protein, 28 aa, Artificial Sequence
  Cyclic GFR-binding peptide
WWFWGGVPTEENAISVLYFDDSSNGGGG

SEQ ID NO: 4962 - protein, 30 aa, Artificial Sequence
  Cyclic GFR-binding peptide
GTPGPGVPTGQNAISVLYFDNGRVGGGGGG

SEQ ID NO: 4963 - protein, 29 aa, Artificial Sequence
  Cyclic GFR-binding peptide
WWFWGGGSRVHHNAISVLYFVGRKPAAAA

SEQ ID NO: 4964 - protein, 31 aa, Artificial Sequence
  Cyclic GFR-binding peptide
GTPGPGGTQVQLNAISVLYFIGKTPAAAAAA

SEQ ID NO: 4965 - protein, 30 aa, Artificial Sequence
  Cyclic GFR-binding peptide
WWFWGGGGAPTELSATSVLYYVGRTPGGGG

SEQ ID NO: 4966 - protein, 32 aa, Artificial Sequence
  Cyclic GFR-binding peptide
GTPGPGGGAPTKMSATSVLYYRIKPHGGGGGG

SEQ ID NO: 4967 - protein, 27 aa, Artificial Sequence
  Cyclic GFR-binding peptide
WWFWGAPTKLSATSVLYYRIKPHAAAA

SEQ ID NO: 4968 - protein, 29 aa, Artificial Sequence
  Cyclic GFR-binding peptide
GTPGPAPTQLSATSVLYYRIKPHAAAAAA

SEQ ID NO: 4969 - protein, 28 aa, Artificial Sequence
  Cyclic GFR-binding peptide
WWFWGGAPTRLSATSVLYYRIKPHGGGG

SEQ ID NO: 4970 - protein, 30 aa, Artificial Sequence
  Cyclic GFR-binding peptide
GTPGPGAPTKTSATSVLYYEYVRKGGGGGG

SEQ ID NO: 4971 - protein, 29 aa, Artificial Sequence
  Cyclic GFR-binding peptide
WWFWGGGAPTALSATSVLYYEIVRKAAAA

SEQ ID NO: 4972 - protein, 29 aa, Artificial Sequence
  Cyclic GFR-binding peptide
GTPGPGGAPTDLSATSVLYYDENEKGGGG

SEQ ID NO: 4973 - protein, 32 aa, Artificial Sequence
  Cyclic GFR-binding peptide
WWFWGGGGVPTELSATSVLYYDENKNGGGGGG

SEQ ID NO: 4974 - protein, 30 aa, Artificial Sequence
  Cyclic GFR-binding peptide
GTPGPGGGVPEKMSATSVLYYDEYDKAAAA

SEQ ID NO: 4975 - protein, 29 aa, Artificial Sequence
  Cyclic GFR-binding peptide
WWFWGVPTKLSATSVLYYDDSSNAAAAAA

SEQ ID NO: 4976 - protein, 27 aa, Artificial Sequence
  Cyclic GFR-binding peptide
GTPGPTPTKMSATSVLYYDDSSNGGGG

SEQ ID NO: 4977 - protein, 30 aa, Artificial Sequence
  Cyclic GFR-binding peptide
WWFWGGVPARLSATSVLYYDDSSNGGGGGG

SEQ ID NO: 4978 - protein, 28 aa, Artificial Sequence
  Cyclic GFR-binding peptide
GTPGPGVPTRLSATSVLYYDSSNNAAAA

SEQ ID NO: 4979 - protein, 31 aa, Artificial Sequence
  Cyclic GFR-binding peptide
WWFWGGGAPVKTSATSVLYYDDMGVAAAAAA

SEQ ID NO: 4980 - protein, 29 aa, Artificial Sequence
  Cyclic GFR-binding peptide
GTPGPGGVPQALSATSVLYYDKGVVGGGG

SEQ ID NO: 4981 - protein, 32 aa, Artificial Sequence
  Cyclic GFR-binding peptide
WWFWGGGGVSQDLSATSVLYYNDKQQGGGGGG

SEQ ID NO: 4982 - protein, 30 aa, Artificial Sequence
  Cyclic GFR-binding peptide
GTPGPGGGVPQDLSATSVLYYDAANNAAAA

SEQ ID NO: 4983 - protein, 29 aa, Artificial Sequence
  Cyclic GFR-binding peptide
WWFWGVPTEESATSVLYYDSANNAAAAAA

SEQ ID NO: 4984 - protein, 27 aa, Artificial Sequence
  Cyclic GFR-binding peptide
GTPGPVPTGQSATSVLYYDDSSNGGGG

SEQ ID NO: 4985 - protein, 30 aa, Artificial Sequence
  Cyclic GFR-binding peptide
WWFWGGSRVHHSATSVLYYDNGRVGGGGGG

SEQ ID NO: 4986 - protein, 28 aa, Artificial Sequence
  Cyclic GFR-binding peptide
GTPGPGTQVQLSATSVLYYVGRKPAAAA

SEQ ID NO: 4987 - protein, 31 aa, Artificial Sequence
  Cyclic GFR-binding peptide
WWFWGGGVPTELSPISVLYKIGKTPAAAAAA

SEQ ID NO: 4988 - protein, 29 aa, Artificial Sequence
  Cyclic GFR-binding peptide
GTPGPGGVPTKMSPISVLYKVGRTPGGGG

SEQ ID NO: 4989 - protein, 32 aa, Artificial Sequence
  Cyclic GFR-binding peptide
WWFWGGGGVPTKLSPISVLYKRIKPHGGGGGG

SEQ ID NO: 4990 - protein, 30 aa, Artificial Sequence
  Cyclic GFR-binding peptide
GTPGPGGGVPTQLSPISVLYKRIKPHAAAA

SEQ ID NO: 4991 - protein, 29 aa, Artificial Sequence
  Cyclic GFR-binding peptide
WWFWGVPTRLSPISVLYKRIKPHAAAAAA

SEQ ID NO: 4992 - protein, 27 aa, Artificial Sequence
  Cyclic GFR-binding peptide
GTPGPVPTKTSPISVLYKRIKPHGGGG

SEQ ID NO: 4993 - protein, 30 aa, Artificial Sequence
  Cyclic GFR-binding peptide
WWFWGGVPTALSPISVLYKEYVRKGGGGGG

SEQ ID NO: 4994 - protein, 28 aa, Artificial Sequence
  Cyclic GFR-binding peptide
GTPGPGVPTDLSPISVLYKEIVRKAAAA

SEQ ID NO: 4995 - protein, 29 aa, Artificial Sequence
  Cyclic GFR-binding peptide
WWFWGGGVPEKMSPISVLYKDENEKGGGG

SEQ ID NO: 4996 - protein, 31 aa, Artificial Sequence
  Cyclic GFR-binding peptide
GTPGPGGAPTKLSPISVLYKDENKNGGGGGG

SEQ ID NO: 4997 - protein, 30 aa, Artificial Sequence
  Cyclic GFR-binding peptide
WWFWGGGGAPTQLSPISVLYKDEYDKAAAA

SEQ ID NO: 4998 - protein, 32 aa, Artificial Sequence
  Cyclic GFR-binding peptide
GTPGPGGGTPTKMSPISVLYKDDSSNAAAAAA

SEQ ID NO: 4999 - protein, 27 aa, Artificial Sequence
  Cyclic GFR-binding peptide
WWFWGVPARLSPISVLYKDDSSNGGGG

SEQ ID NO: 5000 - protein, 29 aa, Artificial Sequence
  Cyclic GFR-binding peptide
GTPGPAPVKTSPISVLYKDDSSNGGGGGG

SEQ ID NO: 5001 - protein, 28 aa, Artificial Sequence
  Cyclic GFR-binding peptide
WWFWGGVPQALSPISVLYKDSSNNAAAA

SEQ ID NO: 5002 - protein, 30 aa, Artificial Sequence
  Cyclic GFR-binding peptide
GTPGPGVSQDLSPISVLYKDDMGVAAAAAA

SEQ ID NO: 5003 - protein, 29 aa, Artificial Sequence
  Cyclic GFR-binding peptide
WWFWGGGVPQDLSPISVLYKDKGVVGGGG

SEQ ID NO: 5004 - protein, 31 aa, Artificial Sequence
  Cyclic GFR-binding peptide
GTPGPGGSRVHHSPISVLYKNDKQQGGGGGG

SEQ ID NO: 5005 - protein, 30 aa, Artificial Sequence
  Cyclic GFR-binding peptide
WWFWGGGGTQVQLSPISVLYKDAANNAAAA

SEQ ID NO: 5006 - protein, 32 aa, Artificial Sequence
  Cyclic GFR-binding peptide
GTPGPGGGVPTELEPISILYLDSANNAAAAAA

SEQ ID NO: 5007 - protein, 27 aa, Artificial Sequence
  Cyclic GFR-binding peptide
WWFWGVPTKMEPISILYLDDSSNGGGG

SEQ ID NO: 5008 - protein, 29 aa, Artificial Sequence
  Cyclic GFR-binding peptide
GTPGPVPTKLEPISILYLDNGRVGGGGGG

SEQ ID NO: 5009 - protein, 28 aa, Artificial Sequence
  Cyclic GFR-binding peptide
WWFWGGVPTQLEPISILYLVGRKPAAAA

SEQ ID NO: 5010 - protein, 30 aa, Artificial Sequence
  Cyclic GFR-binding peptide
GTPGPGVPTRLEPISILYLIGKTPAAAAAA

SEQ ID NO: 5011 - protein, 29 aa, Artificial Sequence
  Cyclic GFR-binding peptide
WWFWGGGVPTKTEPISILYLVGRTPGGGG

SEQ ID NO: 5012 - protein, 31 aa, Artificial Sequence
  Cyclic GFR-binding peptide
GTPGPGGVPTALEPISILYLRIKPHGGGGGG

SEQ ID NO: 5013 - protein, 30 aa, Artificial Sequence
  Cyclic GFR-binding peptide
WWFWGGGGVPTDLEPISILYLRIKPHAAAA

SEQ ID NO: 5014 - protein, 32 aa, Artificial Sequence
  Cyclic GFR-binding peptide
GTPGPGGGVPEKMEPISILYLRIKPHAAAAAA

SEQ ID NO: 5015 - protein, 27 aa, Artificial Sequence
  Cyclic GFR-binding peptide
WWFWGAPTKLEPISILYLRIKPHGGGG

SEQ ID NO: 5016 - protein, 29 aa, Artificial Sequence
  Cyclic GFR-binding peptide
GTPGPAPTQLEPISILYLEYVRKGGGGGG

SEQ ID NO: 5017 - protein, 28 aa, Artificial Sequence
  Cyclic GFR-binding peptide
WWFWGGTPTKMEPISILYLEIVRKAAAA

SEQ ID NO: 5018 - protein, 28 aa, Artificial Sequence
  Cyclic GFR-binding peptide
GTPGPGVPARLEPISILYLDENEKGGGG

SEQ ID NO: 5019 - protein, 31 aa, Artificial Sequence
  Cyclic GFR-binding peptide
WWFWGGGAPVKTEPISILYLDENKNGGGGGG

SEQ ID NO: 5020 - protein, 29 aa, Artificial Sequence
  Cyclic GFR-binding peptide
GTPGPGGVPQALEPISILYLDEYDKAAAA

SEQ ID NO: 5021 - protein, 32 aa, Artificial Sequence
  Cyclic GFR-binding peptide
WWFWGGGGVSQDLEPISILYLDDSSNAAAAAA

SEQ ID NO: 5022 - protein, 30 aa, Artificial Sequence
  Cyclic GFR-binding peptide
GTPGPGGGVPQDLEPISILYLDDSSNGGGG

SEQ ID NO: 5023 - protein, 29 aa, Artificial Sequence
  Cyclic GFR-binding peptide
WWFWGSRVHHEPISILYLDDSSNGGGGGG

SEQ ID NO: 5024 - protein, 27 aa, Artificial Sequence
  Cyclic GFR-binding peptide
GTPGPTQVQLEPISILYLDSSNNAAAA

SEQ ID NO: 5025 - protein, 30 aa, Artificial Sequence
  Cyclic GFR-binding peptide
WWFWGGTPTELSPINMLYFDDMGVAAAAAA

SEQ ID NO: 5026 - protein, 28 aa, Artificial Sequence
  Cyclic GFR-binding peptide
GTPGPGTPTKMSPINMLYFDKGVVGGGG

SEQ ID NO: 5027 - protein, 31 aa, Artificial Sequence
  Cyclic GFR-binding peptide
WWFWGGGTPTKLSPINMLYFNDKQQGGGGGG

SEQ ID NO: 5028 - protein, 29 aa, Artificial Sequence
  Cyclic GFR-binding peptide
GTPGPGGTPTQLSPINMLYFDAANNAAAA

SEQ ID NO: 5029 - protein, 32 aa, Artificial Sequence
  Cyclic GFR-binding peptide
WWFWGGGGTPTRLSPINMLYFDSANNAAAAAA

SEQ ID NO: 5030 - protein, 30 aa, Artificial Sequence
  Cyclic GFR-binding peptide
GTPGPGGGTPTKTSPINMLYFDDSSNGGGG

SEQ ID NO: 5031 - protein, 29 aa, Artificial Sequence
  Cyclic GFR-binding peptide
WWFWGTPTALSPINMLYFDNGRVGGGGGG

SEQ ID NO: 5032 - protein, 27 aa, Artificial Sequence
  Cyclic GFR-binding peptide
GTPGPTPTDLSPINMLYFVGRKPAAAA

SEQ ID NO: 5033 - protein, 30 aa, Artificial Sequence
  Cyclic GFR-binding peptide
WWFWGGVPTELSPINMLYFIGKTPAAAAAA

SEQ ID NO: 5034 - protein, 28 aa, Artificial Sequence
  Cyclic GFR-binding peptide
GTPGPGVPEKMSPINMLYFVGRTPGGGG

SEQ ID NO: 5035 - protein, 31 aa, Artificial Sequence
  Cyclic GFR-binding peptide
WWFWGGGAPTKLSPINMLYFRIKPHGGGGGG

SEQ ID NO: 5036 - protein, 29 aa, Artificial Sequence
  Cyclic GFR-binding peptide
GTPGPGGAPTQLSPINMLYFRIKPHAAAA

SEQ ID NO: 5037 - protein, 32 aa, Artificial Sequence
  Cyclic GFR-binding peptide
WWFWGGGGVPTKLSPINMLYFRIKPHAAAAAA

SEQ ID NO: 5038 - protein, 30 aa, Artificial Sequence
  Cyclic GFR-binding peptide
GTPGPGGGVPARLSPINMLYFRIKPHGGGG

SEQ ID NO: 5039 - protein, 29 aa, Artificial Sequence
  Cyclic GFR-binding peptide
WWFWGVPTRLSPINMLYFEYVRKGGGGGG

SEQ ID NO: 5040 - protein, 27 aa, Artificial Sequence
  Cyclic GFR-binding peptide
GTPGPAPVKTSPINMLYFEIVRKAAAA

SEQ ID NO: 5041 - protein, 28 aa, Artificial Sequence
  Cyclic GFR-binding peptide
WWFWGGVPQALSPINMLYFDENEKGGGG

SEQ ID NO: 5042 - protein, 30 aa, Artificial Sequence
  Cyclic GFR-binding peptide
GTPGPGVSQDLSPINMLYFDENKNGGGGGG

SEQ ID NO: 5043 - protein, 29 aa, Artificial Sequence
  Cyclic GFR-binding peptide
WWFWGGGVPQDLSPINMLYFDEYDKAAAA

SEQ ID NO: 5044 - protein, 31 aa, Artificial Sequence
  Cyclic GFR-binding peptide
GTPGPGGVPTEESPINMLYFDDSSNAAAAAA

SEQ ID NO: 5045 - protein, 30 aa, Artificial Sequence
  Cyclic GFR-binding peptide
WWFWGGGGVPTGQSPINMLYFDDSSNGGGG

SEQ ID NO: 5046 - protein, 32 aa, Artificial Sequence
  Cyclic GFR-binding peptide
GTPGPGGGSRVHHSPINMLYFDDSSNGGGGGG

SEQ ID NO: 5047 - protein, 27 aa, Artificial Sequence
  Cyclic GFR-binding peptide
WWFWGTQVQLSPINMLYFDSSNNAAAA

SEQ ID NO: 5048 - protein, 29 aa, Artificial Sequence
  Cyclic GFR-binding peptide
GTPGPVPAELSPISILYIDDMGVAAAAAA

SEQ ID NO: 5049 - protein, 28 aa, Artificial Sequence
  Cyclic GFR-binding peptide
WWFWGGVPAKMSPISILYIDKGVVGGGG

SEQ ID NO: 5050 - protein, 30 aa, Artificial Sequence
  Cyclic GFR-binding peptide
GTPGPGVPAKLSPISILYINDKQQGGGGGG

SEQ ID NO: 5051 - protein, 29 aa, Artificial Sequence
  Cyclic GFR-binding peptide
WWFWGGGVPAQLSPISILYIDAANNAAAA

SEQ ID NO: 5052 - protein, 31 aa, Artificial Sequence
  Cyclic GFR-binding peptide
GTPGPGGVPARLSPISILYIDSANNAAAAAA

SEQ ID NO: 5053 - protein, 30 aa, Artificial Sequence
  Cyclic GFR-binding peptide
WWFWGGGGVPAKTSPISILYIDDSSNGGGG

SEQ ID NO: 5054 - protein, 32 aa, Artificial Sequence
  Cyclic GFR-binding peptide
GTPGPGGGVPAALSPISILYIDNGRVGGGGGG

SEQ ID NO: 5055 - protein, 27 aa, Artificial Sequence
  Cyclic GFR-binding peptide
WWFWGVPADLSPISILYIVGRKPAAAA

SEQ ID NO: 5056 - protein, 29 aa, Artificial Sequence
  Cyclic GFR-binding peptide
GTPGPVPTELSPISILYIIGKTPAAAAAA

SEQ ID NO: 5057 - protein, 28 aa, Artificial Sequence
  Cyclic GFR-binding peptide
WWFWGGVPEKMSPISILYIVGRTPGGGG

SEQ ID NO: 5058 - protein, 30 aa, Artificial Sequence
  Cyclic GFR-binding peptide
GTPGPGAPTKLSPISILYIRIKPHGGGGGG

SEQ ID NO: 5059 - protein, 29 aa, Artificial Sequence
  Cyclic GFR-binding peptide
WWFWGGGAPTQLSPISILYIRIKPHAAAA

SEQ ID NO: 5060 - protein, 31 aa, Artificial Sequence
  Cyclic GFR-binding peptide
GTPGPGGVPTKLSPISILYIRIKPHAAAAAA

SEQ ID NO: 5061 - protein, 30 aa, Artificial Sequence
  Cyclic GFR-binding peptide
WWFWGGGGTPTKMSPISILYIRIKPHGGGG

SEQ ID NO: 5062 - protein, 32 aa, Artificial Sequence
  Cyclic GFR-binding peptide
GTPGPGGGVPTRLSPISILYIEYVRKGGGGGG

SEQ ID NO: 5063 - protein, 27 aa, Artificial Sequence
  Cyclic GFR-binding peptide
WWFWGAPVKTSPISILYIEIVRKAAAA

SEQ ID NO: 5064 - protein, 27 aa, Artificial Sequence
  Cyclic GFR-binding peptide
GTPGPVPQALSPISILYIDENEKGGGG

SEQ ID NO: 5065 - protein, 30 aa, Artificial Sequence
  Cyclic GFR-binding peptide
WWFWGGVSQDLSPISILYIDENKNGGGGGG

SEQ ID NO: 5066 - protein, 28 aa, Artificial Sequence
  Cyclic GFR-binding peptide
GTPGPGVPQDLSPISILYIDEYDKAAAA

SEQ ID NO: 5067 - protein, 31 aa, Artificial Sequence
  Cyclic GFR-binding peptide
WWFWGGGVPTEESPISILYIDDSSNAAAAAA

SEQ ID NO: 5068 - protein, 29 aa, Artificial Sequence
  Cyclic GFR-binding peptide
GTPGPGGVPTGQSPISILYIDDSSNGGGG

SEQ ID NO: 5069 - protein, 32 aa, Artificial Sequence
  Cyclic GFR-binding peptide
WWFWGGGGSRVHHSPISILYIDDSSNGGGGGG

SEQ ID NO: 5070 - protein, 30 aa, Artificial Sequence
  Cyclic GFR-binding peptide
GTPGPGGGTQVQLSPISILYIDSSNNAAAA

SEQ ID NO: 5071 - protein, 29 aa, Artificial Sequence
  Cyclic GFR-binding peptide
WWFWGVPTELSPISILFIDDMGVAAAAAA

SEQ ID NO: 5072 - protein, 27 aa, Artificial Sequence
  Cyclic GFR-binding peptide
GTPGPVPTKMSPISILFIDKGVVGGGG

SEQ ID NO: 5073 - protein, 30 aa, Artificial Sequence
  Cyclic GFR-binding peptide
WWFWGGVPTKLSPISILFINDKQQGGGGGG

SEQ ID NO: 5074 - protein, 28 aa, Artificial Sequence
  Cyclic GFR-binding peptide
GTPGPGVPTQLSPISILFIDAANNAAAA

SEQ ID NO: 5075 - protein, 31 aa, Artificial Sequence
  Cyclic GFR-binding peptide
WWFWGGGVPTRLSPISILFIDSANNAAAAAA

SEQ ID NO: 5076 - protein, 29 aa, Artificial Sequence
  Cyclic GFR-binding peptide
GTPGPGGVPTKTSPISILFIDDSSNGGGG

SEQ ID NO: 5077 - protein, 32 aa, Artificial Sequence
  Cyclic GFR-binding peptide
WWFWGGGGVPTALSPISILFIDNGRVGGGGGG

SEQ ID NO: 5078 - protein, 30 aa, Artificial Sequence
  Cyclic GFR-binding peptide
GTPGPGGGVPTDLSPISILFIVGRKPAAAA

SEQ ID NO: 5079 - protein, 29 aa, Artificial Sequence
  Cyclic GFR-binding peptide
WWFWGVPEKMSPISILFIIGKTPAAAAAA

SEQ ID NO: 5080 - protein, 27 aa, Artificial Sequence
  Cyclic GFR-binding peptide
GTPGPAPTKLSPISILFIVGRTPGGGG

SEQ ID NO: 5081 - protein, 30 aa, Artificial Sequence
  Cyclic GFR-binding peptide
WWFWGGAPTQLSPISILFIRIKPHGGGGGG

SEQ ID NO: 5082 - protein, 28 aa, Artificial Sequence
  Cyclic GFR-binding peptide
GTPGPGTPTKMSPISILFIRIKPHAAAA

SEQ ID NO: 5083 - protein, 31 aa, Artificial Sequence
  Cyclic GFR-binding peptide
WWFWGGGVPARLSPISILFIRIKPHAAAAAA

SEQ ID NO: 5084 - protein, 29 aa, Artificial Sequence
  Cyclic GFR-binding peptide
GTPGPGGAPVKTSPISILFIRIKPHGGGG

SEQ ID NO: 5085 - protein, 32 aa, Artificial Sequence
  Cyclic GFR-binding peptide
WWFWGGGGVPQALSPISILFIEYVRKGGGGGG

SEQ ID NO: 5086 - protein, 30 aa, Artificial Sequence
  Cyclic GFR-binding peptide
GTPGPGGGVSQDLSPISILFIEIVRKAAAA

SEQ ID NO: 5087 - protein, 27 aa, Artificial Sequence
  Cyclic GFR-binding peptide
WWFWGVPQDLSPISILFIDENEKGGGG

SEQ ID NO: 5088 - protein, 29 aa, Artificial Sequence
  Cyclic GFR-binding peptide
GTPGPSRVHHSPISILFIDENKNGGGGGG

SEQ ID NO: 5089 - protein, 28 aa, Artificial Sequence
  Cyclic GFR-binding peptide
WWFWGGTQVQLSPISILFIDEYDKAAAA

SEQ ID NO: 5090 - protein, 30 aa, Artificial Sequence
  Cyclic GFR-binding peptide
GTPGPGAPVELKPLSMLYVDDSSNAAAAAA

SEQ ID NO: 5091 - protein, 29 aa, Artificial Sequence
  Cyclic GFR-binding peptide
WWFWGGGAPVKMKPLSMLYVDDSSNGGGG

SEQ ID NO: 5092 - protein, 31 aa, Artificial Sequence
  Cyclic GFR-binding peptide
GTPGPGGAPVKLKPLSMLYVDDSSNGGGGGG

SEQ ID NO: 5093 - protein, 30 aa, Artificial Sequence
  Cyclic GFR-binding peptide
WWFWGGGGAPVQLKPLSMLYVDSSNNAAAA

SEQ ID NO: 5094 - protein, 32 aa, Artificial Sequence
  Cyclic GFR-binding peptide
GTPGPGGGAPVRLKPLSMLYVDDMGVAAAAAA

SEQ ID NO: 5095 - protein, 27 aa, Artificial Sequence
  Cyclic GFR-binding peptide
WWFWGAPVALKPLSMLYVDKGVVGGGG

SEQ ID NO: 5096 - protein, 29 aa, Artificial Sequence
  Cyclic GFR-binding peptide
GTPGPAPVDLKPLSMLYVNDKQQGGGGGG

SEQ ID NO: 5097 - protein, 28 aa, Artificial Sequence
  Cyclic GFR-binding peptide
WWFWGGVPTELKPLSMLYVDAANNAAAA

SEQ ID NO: 5098 - protein, 30 aa, Artificial Sequence
  Cyclic GFR-binding peptide
GTPGPGVPEKMKPLSMLYVDSANNAAAAAA

SEQ ID NO: 5099 - protein, 29 aa, Artificial Sequence
  Cyclic GFR-binding peptide
WWFWGGGAPTKLKPLSMLYVDDSSNGGGG

SEQ ID NO: 5100 - protein, 31 aa, Artificial Sequence
  Cyclic GFR-binding peptide
GTPGPGGAPTQLKPLSMLYVDNGRVGGGGGG

SEQ ID NO: 5101 - protein, 30 aa, Artificial Sequence
  Cyclic GFR-binding peptide
WWFWGGGGVPTKLKPLSMLYVVGRKPAAAA

SEQ ID NO: 5102 - protein, 32 aa, Artificial Sequence
  Cyclic GFR-binding peptide
GTPGPGGGTPTKMKPLSMLYVIGKTPAAAAAA

SEQ ID NO: 5103 - protein, 27 aa, Artificial Sequence
  Cyclic GFR-binding peptide
WWFWGVPARLKPLSMLYVVGRTPGGGG

SEQ ID NO: 5104 - protein, 29 aa, Artificial Sequence
  Cyclic GFR-binding peptide
GTPGPVPTRLKPLSMLYVRIKPHGGGGGG

SEQ ID NO: 5105 - protein, 28 aa, Artificial Sequence
  Cyclic GFR-binding peptide
WWFWGGVPQALKPLSMLYVRIKPHAAAA

SEQ ID NO: 5106 - protein, 30 aa, Artificial Sequence
  Cyclic GFR-binding peptide
GTPGPGVSQDLKPLSMLYVRIKPHAAAAAA

SEQ ID NO: 5107 - protein, 29 aa, Artificial Sequence
  Cyclic GFR-binding peptide
WWFWGGGVPQDLKPLSMLYVRIKPHGGGG

SEQ ID NO: 5108 - protein, 31 aa, Artificial Sequence
  Cyclic GFR-binding peptide
GTPGPGGVPTEEKPLSMLYVEYVRKGGGGGG

SEQ ID NO: 5109 - protein, 30 aa, Artificial Sequence
  Cyclic GFR-binding peptide
WWFWGGGGVPTGQKPLSMLYVEIVRKAAAA

SEQ ID NO: 5110 - protein, 30 aa, Artificial Sequence
  Cyclic GFR-binding peptide
GTPGPGGGSRVHHKPLSMLYVDENEKGGGG

SEQ ID NO: 5111 - protein, 29 aa, Artificial Sequence
  Cyclic GFR-binding peptide
WWFWGTQVQLKPLSMLYVDENKNGGGGGG

SEQ ID NO: 5112 - protein, 27 aa, Artificial Sequence
  Cyclic GFR-binding peptide
GTPGPVPQELEPLPIVYYDEYDKAAAA

SEQ ID NO: 5113 - protein, 30 aa, Artificial Sequence
  Cyclic GFR-binding peptide
WWFWGGVPQKMEPLPIVYYDDSSNAAAAAA

SEQ ID NO: 5114 - protein, 28 aa, Artificial Sequence
  Cyclic GFR-binding peptide
GTPGPGVPQKLEPLPIVYYDDSSNGGGG

SEQ ID NO: 5115 - protein, 31 aa, Artificial Sequence
  Cyclic GFR-binding peptide
WWFWGGGVPQQLEPLPIVYYDDSSNGGGGGG

SEQ ID NO: 5116 - protein, 29 aa, Artificial Sequence
  Cyclic GFR-binding peptide
GTPGPGGVPQRLEPLPIVYYDSSNNAAAA

SEQ ID NO: 5117 - protein, 32 aa, Artificial Sequence
  Cyclic GFR-binding peptide
WWFWGGGGVPQKTEPLPIVYYDDMGVAAAAAA

SEQ ID NO: 5118 - protein, 30 aa, Artificial Sequence
  Cyclic GFR-binding peptide
GTPGPGGGVPQDLEPLPIVYYDKGVVGGGG

SEQ ID NO: 5119 - protein, 29 aa, Artificial Sequence
  Cyclic GFR-binding peptide
WWFWGVPTELEPLPIVYYNDKQQGGGGGG

SEQ ID NO: 5120 - protein, 27 aa, Artificial Sequence
  Cyclic GFR-binding peptide
GTPGPVPEKMEPLPIVYYDAANNAAAA

SEQ ID NO: 5121 - protein, 30 aa, Artificial Sequence
  Cyclic GFR-binding peptide
WWFWGGAPTKLEPLPIVYYDSANNAAAAAA

SEQ ID NO: 5122 - protein, 28 aa, Artificial Sequence
  Cyclic GFR-binding peptide
GTPGPGAPTQLEPLPIVYYDDSSNGGGG

SEQ ID NO: 5123 - protein, 31 aa, Artificial Sequence
  Cyclic GFR-binding peptide
WWFWGGGVPTKLEPLPIVYYDNGRVGGGGGG

SEQ ID NO: 5124 - protein, 29 aa, Artificial Sequence
  Cyclic GFR-binding peptide
GTPGPGGTPTKMEPLPIVYYVGRKPAAAA

SEQ ID NO: 5125 - protein, 32 aa, Artificial Sequence
  Cyclic GFR-binding peptide
WWFWGGGGVPARLEPLPIVYYIGKTPAAAAAA

SEQ ID NO: 5126 - protein, 30 aa, Artificial Sequence
  Cyclic GFR-binding peptide
GTPGPGGGVPTRLEPLPIVYYVGRTPGGGG

SEQ ID NO: 5127 - protein, 29 aa, Artificial Sequence
  Cyclic GFR-binding peptide
WWFWGAPVKTEPLPIVYYRIKPHGGGGGG

SEQ ID NO: 5128 - protein, 27 aa, Artificial Sequence
  Cyclic GFR-binding peptide
GTPGPVSQDLEPLPIVYYRIKPHAAAA

SEQ ID NO: 5129 - protein, 30 aa, Artificial Sequence
  Cyclic GFR-binding peptide
WWFWGGVPTEEEPLPIVYYRIKPHAAAAAA

SEQ ID NO: 5130 - protein, 28 aa, Artificial Sequence
  Cyclic GFR-binding peptide
GTPGPGVPTGQEPLPIVYYRIKPHGGGG

SEQ ID NO: 5131 - protein, 31 aa, Artificial Sequence
  Cyclic GFR-binding peptide
WWFWGGGSRVHHEPLPIVYYEYVRKGGGGGG

SEQ ID NO: 5132 - protein, 29 aa, Artificial Sequence
  Cyclic GFR-binding peptide
GTPGPGGTQVQLEPLPIVYYEIVRKAAAA

SEQ ID NO: 5133 - protein, 30 aa, Artificial Sequence
  Cyclic GFR-binding peptide
WWFWGGGGVSQELEPLTILYYDENEKGGGG

SEQ ID NO: 5134 - protein, 32 aa, Artificial Sequence
  Cyclic GFR-binding peptide
GTPGPGGGVSQKMEPLTILYYDENKNGGGGGG

SEQ ID NO: 5135 - protein, 27 aa, Artificial Sequence
  Cyclic GFR-binding peptide
WWFWGVSQKLEPLTILYYDEYDKAAAA

SEQ ID NO: 5136 - protein, 29 aa, Artificial Sequence
  Cyclic GFR-binding peptide
GTPGPVSQQLEPLTILYYDDSSNAAAAAA

SEQ ID NO: 5137 - protein, 28 aa, Artificial Sequence
  Cyclic GFR-binding peptide
WWFWGGVSQRLEPLTILYYDDSSNGGGG

SEQ ID NO: 5138 - protein, 30 aa, Artificial Sequence
  Cyclic GFR-binding peptide
GTPGPGVSQKTEPLTILYYDDSSNGGGGGG

SEQ ID NO: 5139 - protein, 29 aa, Artificial Sequence
  Cyclic GFR-binding peptide
WWFWGGGVSQALEPLTILYYDSSNNAAAA

SEQ ID NO: 5140 - protein, 31 aa, Artificial Sequence
  Cyclic GFR-binding peptide
GTPGPGGVSQDLEPLTILYYDDMGVAAAAAA

SEQ ID NO: 5141 - protein, 30 aa, Artificial Sequence
  Cyclic GFR-binding peptide
WWFWGGGGVPTELEPLTILYYDKGVVGGGG

SEQ ID NO: 5142 - protein, 32 aa, Artificial Sequence
  Cyclic GFR-binding peptide
GTPGPGGGVPEKMEPLTILYYNDKQQGGGGGG

SEQ ID NO: 5143 - protein, 27 aa, Artificial Sequence
  Cyclic GFR-binding peptide
WWFWGAPTKLEPLTILYYDAANNAAAA

SEQ ID NO: 5144 - protein, 29 aa, Artificial Sequence
  Cyclic GFR-binding peptide
GTPGPAPTQLEPLTILYYDSANNAAAAAA

SEQ ID NO: 5145 - protein, 28 aa, Artificial Sequence
  Cyclic GFR-binding peptide
WWFWGGVPTKLEPLTILYYDDSSNGGGG

SEQ ID NO: 5146 - protein, 30 aa, Artificial Sequence
  Cyclic GFR-binding peptide
GTPGPGTPTKMEPLTILYYDNGRVGGGGGG

SEQ ID NO: 5147 - protein, 29 aa, Artificial Sequence
  Cyclic GFR-binding peptide
WWFWGGGVPARLEPLTILYYVGRKPAAAA

SEQ ID NO: 5148 - protein, 31 aa, Artificial Sequence
  Cyclic GFR-binding peptide
GTPGPGGVPTRLEPLTILYYIGKTPAAAAAA

SEQ ID NO: 5149 - protein, 30 aa, Artificial Sequence
  Cyclic GFR-binding peptide
WWFWGGGGAPVKTEPLTILYYVGRTPGGGG

SEQ ID NO: 5150 - protein, 32 aa, Artificial Sequence
  Cyclic GFR-binding peptide
GTPGPGGGVPQALEPLTILYYRIKPHGGGGGG

SEQ ID NO: 5151 - protein, 27 aa, Artificial Sequence
  Cyclic GFR-binding peptide
WWFWGVPTEEEPLTILYYRIKPHAAAA

SEQ ID NO: 5152 - protein, 29 aa, Artificial Sequence
  Cyclic GFR-binding peptide
GTPGPVPTGQEPLTILYYRIKPHAAAAAA

SEQ ID NO: 5153 - protein, 28 aa, Artificial Sequence
  Cyclic GFR-binding peptide
WWFWGGSRVHHEPLTILYYRIKPHGGGG

SEQ ID NO: 5154 - protein, 30 aa, Artificial Sequence
  Cyclic GFR-binding peptide
GTPGPGTQVQLEPLTILYYEYVRKGGGGGG

SEQ ID NO: 5155 - protein, 29 aa, Artificial Sequence
  Cyclic GFR-binding peptide
WWFWGGGVPQELEPLTILYYEIVRKAAAA

SEQ ID NO: 5156 - protein, 29 aa, Artificial Sequence
  Cyclic GFR-binding peptide
GTPGPGGVPQKMEPLTILYYDENEKGGGG

SEQ ID NO: 5157 - protein, 32 aa, Artificial Sequence
  Cyclic GFR-binding peptide
WWFWGGGGVPQKLEPLTILYYDENKNGGGGGG

SEQ ID NO: 5158 - protein, 30 aa, Artificial Sequence
  Cyclic GFR-binding peptide
GTPGPGGGVPQQLEPLTILYYDEYDKAAAA

SEQ ID NO: 5159 - protein, 29 aa, Artificial Sequence
  Cyclic GFR-binding peptide
WWFWGVPQRLEPLTILYYDDSSNAAAAAA

SEQ ID NO: 5160 - protein, 27 aa, Artificial Sequence
  Cyclic GFR-binding peptide
GTPGPVPQKTEPLTILYYDDSSNGGGG

SEQ ID NO: 5161 - protein, 30 aa, Artificial Sequence
  Cyclic GFR-binding peptide
WWFWGGVPQDLEPLTILYYDDSSNGGGGGG

SEQ ID NO: 5162 - protein, 28 aa, Artificial Sequence
  Cyclic GFR-binding peptide
GTPGPGVPTGQSNITMQIMDSSNNAAAA

SEQ ID NO: 5163 - protein, 31 aa, Artificial Sequence
  Cyclic GFR-binding peptide
WWFWGGGVPEKMSNITMQIMDDMGVAAAAAA

SEQ ID NO: 5164 - protein, 29 aa, Artificial Sequence
  Cyclic GFR-binding peptide
GTPGPGGAPTKLSNITMQIMDKGVVGGGG

SEQ ID NO: 5165 - protein, 32 aa, Artificial Sequence
  Cyclic GFR-binding peptide
WWFWGGGGAPTQLSNITMQIMNDKQQGGGGGG

SEQ ID NO: 5166 - protein, 30 aa, Artificial Sequence
  Cyclic GFR-binding peptide
GTPGPGGGTPTKMSNITMQIMDAANNAAAA

SEQ ID NO: 5167 - protein, 29 aa, Artificial Sequence
  Cyclic GFR-binding peptide
WWFWGVPARLSNITMQIMDSANNAAAAAA

SEQ ID NO: 5168 - protein, 27 aa, Artificial Sequence
  Cyclic GFR-binding peptide
GTPGPAPVKTSNITMQIMDDSSNGGGG

SEQ ID NO: 5169 - protein, 30 aa, Artificial Sequence
  Cyclic GFR-binding peptide
WWFWGGVPQALSNITMQIMDNGRVGGGGGG

SEQ ID NO: 5170 - protein, 28 aa, Artificial Sequence
  Cyclic GFR-binding peptide
GTPGPGVSQDLSNITMQIMVGRKPAAAA

SEQ ID NO: 5171 - protein, 31 aa, Artificial Sequence
  Cyclic GFR-binding peptide
WWFWGGGVPQDLSNITMQIMIGKTPAAAAAA

SEQ ID NO: 5172 - protein, 29 aa, Artificial Sequence
  Cyclic GFR-binding peptide
GTPGPGGSRVHHSNITMQIMVGRTPGGGG

SEQ ID NO: 5173 - protein, 32 aa, Artificial Sequence
  Cyclic GFR-binding peptide
WWFWGGGGTQVQLSNITMQIMRIKPHGGGGGG

SEQ ID NO: 5174 - protein, 30 aa, Artificial Sequence
  Cyclic GFR-binding peptide
GTPGPGGGSRVQLRSVKVAKVRIKPHAAAA

SEQ ID NO: 5175 - protein, 29 aa, Artificial Sequence
  Cyclic GFR-binding peptide
WWFWGVPTELRSVKVAKVRIKPHAAAAAA

SEQ ID NO: 5176 - protein, 27 aa, Artificial Sequence
  Cyclic GFR-binding peptide
GTPGPVPEKMRSVKVAKVRIKPHGGGG

SEQ ID NO: 5177 - protein, 30 aa, Artificial Sequence
  Cyclic GFR-binding peptide
WWFWGGAPTKLRSVKVAKVEYVRKGGGGGG

SEQ ID NO: 5178 - protein, 28 aa, Artificial Sequence
  Cyclic GFR-binding peptide
GTPGPGAPTQLRSVKVAKVEIVRKAAAA

SEQ ID NO: 5179 - protein, 29 aa, Artificial Sequence
  Cyclic GFR-binding peptide
WWFWGGGVPTKLRSVKVAKVDENEKGGGG

SEQ ID NO: 5180 - protein, 31 aa, Artificial Sequence
  Cyclic GFR-binding peptide
GTPGPGGTPTKMRSVKVAKVDENKNGGGGGG

SEQ ID NO: 5181 - protein, 30 aa, Artificial Sequence
  Cyclic GFR-binding peptide
WWFWGGGGVPARLRSVKVAKVDEYDKAAAA

SEQ ID NO: 5182 - protein, 32 aa, Artificial Sequence
  Cyclic GFR-binding peptide
GTPGPGGGVPTRLRSVKVAKVDDSSNAAAAAA

SEQ ID NO: 5183 - protein, 27 aa, Artificial Sequence
  Cyclic GFR-binding peptide
WWFWGAPVKTRSVKVAKVDDSSNGGGG

SEQ ID NO: 5184 - protein, 29 aa, Artificial Sequence
  Cyclic GFR-binding peptide
GTPGPVPQALRSVKVAKVDDSSNGGGGGG

SEQ ID NO: 5185 - protein, 28 aa, Artificial Sequence
  Cyclic GFR-binding peptide
WWFWGGVSQDLRSVKVAKVDSSNNAAAA

SEQ ID NO: 5186 - protein, 30 aa, Artificial Sequence
  Cyclic GFR-binding peptide
GTPGPGVPQDLRSVKVAKVDDMGVAAAAAA

SEQ ID NO: 5187 - protein, 29 aa, Artificial Sequence
  Cyclic GFR-binding peptide
WWFWGGGVPTEERSVKVAKVDKGVVGGGG

SEQ ID NO: 5188 - protein, 31 aa, Artificial Sequence
  Cyclic GFR-binding peptide
GTPGPGGVPTGQRSVKVAKVNDKQQGGGGGG

SEQ ID NO: 5189 - protein, 30 aa, Artificial Sequence
  Cyclic GFR-binding peptide
WWFWGGGGTQVQLRSVKVAKVDAANNAAAA

SEQ ID NO: 5190 - protein, 32 aa, Artificial Sequence
  Cyclic GFR-binding peptide
GTPGPGGGTQVHHRPVQVRKIDSANNAAAAAA

SEQ ID NO: 5191 - protein, 27 aa, Artificial Sequence
  Cyclic GFR-binding peptide
WWFWGVPTELRPVQVRKIDDSSNGGGG

SEQ ID NO: 5192 - protein, 29 aa, Artificial Sequence
  Cyclic GFR-binding peptide
GTPGPVPEKMRPVQVRKIDNGRVGGGGGG

SEQ ID NO: 5193 - protein, 28 aa, Artificial Sequence
  Cyclic GFR-binding peptide
WWFWGGAPTKLRPVQVRKIVGRKPAAAA

SEQ ID NO: 5194 - protein, 30 aa, Artificial Sequence
  Cyclic GFR-binding peptide
GTPGPGAPTQLRPVQVRKIIGKTPAAAAAA

SEQ ID NO: 5195 - protein, 29 aa, Artificial Sequence
  Cyclic GFR-binding peptide
WWFWGGGVPTKLRPVQVRKIVGRTPGGGG

SEQ ID NO: 5196 - protein, 31 aa, Artificial Sequence
  Cyclic GFR-binding peptide
GTPGPGGTPTKMRPVQVRKIRIKPHGGGGGG

SEQ ID NO: 5197 - protein, 30 aa, Artificial Sequence
  Cyclic GFR-binding peptide
WWFWGGGGVPARLRPVQVRKIRIKPHAAAA

SEQ ID NO: 5198 - protein, 32 aa, Artificial Sequence
  Cyclic GFR-binding peptide
GTPGPGGGVPTRLRPVQVRKIRIKPHAAAAAA

SEQ ID NO: 5199 - protein, 27 aa, Artificial Sequence
  Cyclic GFR-binding peptide
WWFWGAPVKTRPVQVRKIRIKPHGGGG

SEQ ID NO: 5200 - protein, 29 aa, Artificial Sequence
  Cyclic GFR-binding peptide
GTPGPVPQALRPVQVRKIEYVRKGGGGGG

SEQ ID NO: 5201 - protein, 28 aa, Artificial Sequence
  Cyclic GFR-binding peptide
WWFWGGVSQDLRPVQVRKIEIVRKAAAA

SEQ ID NO: 5202 - protein, 28 aa, Artificial Sequence
  Cyclic GFR-binding peptide
GTPGPGVPQDLRPVQVRKIDENEKGGGG

SEQ ID NO: 5203 - protein, 31 aa, Artificial Sequence
  Cyclic GFR-binding peptide
WWFWGGGVPTEERPVQVRKIDENKNGGGGGG

SEQ ID NO: 5204 - protein, 29 aa, Artificial Sequence
  Cyclic GFR-binding peptide
GTPGPGGVPTGQRPVQVRKIDEYDKAAAA

SEQ ID NO: 5205 - protein, 32 aa, Artificial Sequence
  Cyclic GFR-binding peptide
WWFWGGGGSRVHHRPVQVRKIDDSSNAAAAAA

SEQ ID NO: 5206 - protein, 27 aa, Artificial Sequence
  Cyclic GFR-binding peptide
GTPGPGGGSAISILYLDENEKVVGGGG

SEQ ID NO: 5207 - protein, 26 aa, Artificial Sequence
  Cyclic GFR-binding peptide
WWFWGSAISVLYLDENKNVVGGGGGG

SEQ ID NO: 5208 - protein, 24 aa, Artificial Sequence
  Cyclic GFR-binding peptide
GTPGPSSLSMLFFDEYDKVVAAAA

SEQ ID NO: 5209 - protein, 27 aa, Artificial Sequence
  Cyclic GFR-binding peptide
WWFWGGSSLSVLFFDDSSNVIAAAAAA

SEQ ID NO: 5210 - protein, 25 aa, Artificial Sequence
  Cyclic GFR-binding peptide
GTPGPGNAISMLYFDDSSNVIGGGG

SEQ ID NO: 5211 - protein, 28 aa, Artificial Sequence
  Cyclic GFR-binding peptide
WWFWGGGNAISILYFDDSSNVIGGGGGG

SEQ ID NO: 5212 - protein, 26 aa, Artificial Sequence
  Cyclic GFR-binding peptide
GTPGPGGSATSMLYYDSSNNVIAAAA

SEQ ID NO: 5213 - protein, 29 aa, Artificial Sequence
  Cyclic GFR-binding peptide
WWFWGGGGSATSILYYDDMGVPTAAAAAA

SEQ ID NO: 5214 - protein, 27 aa, Artificial Sequence
  Cyclic GFR-binding peptide
GTPGPGGGSPISMLYKDKGVVTYGGGG

SEQ ID NO: 5215 - protein, 26 aa, Artificial Sequence
  Cyclic GFR-binding peptide
WWFWGSPISILYKNDKQQIIGGGGGG

SEQ ID NO: 5216 - protein, 24 aa, Artificial Sequence
  Cyclic GFR-binding peptide
GTPGPEPISMLYLDAANNVVAAAA

SEQ ID NO: 5217 - protein, 27 aa, Artificial Sequence
  Cyclic GFR-binding peptide
WWFWGGEPISVLYLDSANNVVAAAAAA

SEQ ID NO: 5218 - protein, 25 aa, Artificial Sequence
  Cyclic GFR-binding peptide
GTPGPGSPINILYFDDSSNVIGGGG

SEQ ID NO: 5219 - protein, 28 aa, Artificial Sequence
  Cyclic GFR-binding peptide
WWFWGGGSPINVLYFDNGRVLLGGGGGG

SEQ ID NO: 5220 - protein, 26 aa, Artificial Sequence
  Cyclic GFR-binding peptide
GTPGPGGSPISMLYIVGRKPKVAAAA

SEQ ID NO: 5221 - protein, 29 aa, Artificial Sequence
  Cyclic GFR-binding peptide
WWFWGGGGSPISVLYIIGKTPKIAAAAAA

SEQ ID NO: 5222 - protein, 27 aa, Artificial Sequence
  Cyclic GFR-binding peptide
GTPGPGGGSPISMLFIVGRTPKVGGGG

SEQ ID NO: 5223 - protein, 28 aa, Artificial Sequence
  Cyclic GFR-binding peptide
WWFWGSPISVLFIRIKPHQGQHGGGGGG

SEQ ID NO: 5224 - protein, 26 aa, Artificial Sequence
  Cyclic GFR-binding peptide
GTPGPKPLSILYVRIKPHQGQHAAAA

SEQ ID NO: 5225 - protein, 29 aa, Artificial Sequence
  Cyclic GFR-binding peptide
WWFWGGKPLSVLYVRIKPHQGQHAAAAAA

SEQ ID NO: 5226 - protein, 27 aa, Artificial Sequence
  Cyclic GFR-binding peptide
GTPGPGEPLPMVYYRIKPHQGQHGGGG

SEQ ID NO: 5227 - protein, 30 aa, Artificial Sequence
  Cyclic GFR-binding peptide
WWFWGGGEPLPVVYYEYVRKKPKLGGGGGG

SEQ ID NO: 5228 - protein, 28 aa, Artificial Sequence
  Cyclic GFR-binding peptide
GTPGPGGEPLTMLYYEIVRKKPIFAAAA

SEQ ID NO: 5229 - protein, 29 aa, Artificial Sequence
  Cyclic GFR-binding peptide
WWFWGGGGEPLTVLYYDENEKVVAAAAAA

SEQ ID NO: 5230 - protein, 27 aa, Artificial Sequence
  Cyclic GFR-binding peptide
GTPGPGGGSNITIQIMDENKNVVGGGG

SEQ ID NO: 5231 - protein, 26 aa, Artificial Sequence
  Cyclic GFR-binding peptide
WWFWGSNITVQIMDEYDKVVGGGGGG

SEQ ID NO: 5232 - protein, 24 aa, Artificial Sequence
  Cyclic GFR-binding peptide
GTPGPRSVKMAKVDDSSNVIAAAA

SEQ ID NO: 5233 - protein, 27 aa, Artificial Sequence
  Cyclic GFR-binding peptide
WWFWGGRSVKIAKVDDSSNVIAAAAAA

SEQ ID NO: 5234 - protein, 25 aa, Artificial Sequence
  Cyclic GFR-binding peptide
GTPGPGRPVQMRKIDDSSNVIGGGG

SEQ ID NO: 5235 - protein, 28 aa, Artificial Sequence
  Cyclic GFR-binding peptide
WWFWGGGRPVQIRKIDSSNNVIGGGGGG

SEQ ID NO: 5236 - protein, 26 aa, Artificial Sequence
  Cyclic GFR-binding peptide
GTPGPGGSAISMLYLDDMGVPTAAAA

SEQ ID NO: 5237 - protein, 29 aa, Artificial Sequence
  Cyclic GFR-binding peptide
WWFWGGGGSSLSILFFDKGVVTYAAAAAA

SEQ ID NO: 5238 - protein, 27 aa, Artificial Sequence
  Cyclic GFR-binding peptide
GTPGPGGGNAISVLYFNDKQQIIGGGG

SEQ ID NO: 5239 - protein, 26 aa, Artificial Sequence
  Cyclic GFR-binding peptide
WWFWGSATSVLYYDAANNVVGGGGGG

SEQ ID NO: 5240 - protein, 24 aa, Artificial Sequence
  Cyclic GFR-binding peptide
GTPGPSPISVLYKDSANNVVAAAA

SEQ ID NO: 5241 - protein, 27 aa, Artificial Sequence
  Cyclic GFR-binding peptide
WWFWGGEPISILYLDDSSNVIAAAAAA

SEQ ID NO: 5242 - protein, 25 aa, Artificial Sequence
  Cyclic GFR-binding peptide
GTPGPGSPINMLYFDNGRVLLGGGG

SEQ ID NO: 5243 - protein, 28 aa, Artificial Sequence
  Cyclic GFR-binding peptide
WWFWGGGSPISILYIVGRKPKVGGGGGG

SEQ ID NO: 5244 - protein, 26 aa, Artificial Sequence
  Cyclic GFR-binding peptide
GTPGPGGSPISILFIIGKTPKIAAAA

SEQ ID NO: 5245 - protein, 29 aa, Artificial Sequence
  Cyclic GFR-binding peptide
WWFWGGGGKPLSMLYVVGRTPKVAAAAAA

SEQ ID NO: 5246 - protein, 29 aa, Artificial Sequence
  Cyclic GFR-binding peptide
GTPGPGGGEPLPIVYYRIKPHQGQHGGGG

SEQ ID NO: 5247 - protein, 28 aa, Artificial Sequence
  Cyclic GFR-binding peptide
WWFWGEPLTILYYRIKPHQGQHGGGGGG

SEQ ID NO: 5248 - protein, 26 aa, Artificial Sequence
  Cyclic GFR-binding peptide
GTPGPSNITMQIMRIKPHQGQHAAAA

SEQ ID NO: 5249 - protein, 29 aa, Artificial Sequence
  Cyclic GFR-binding peptide
WWFWGGRSVKVAKVRIKPHQGQHAAAAAA

SEQ ID NO: 5250 - protein, 27 aa, Artificial Sequence
  Cyclic GFR-binding peptide
GTPGPGRPVQVRKIEYVRKKPKLGGGG

SEQ ID NO: 5251 - protein, 20 aa, Artificial Sequence
  Cyclic GFR-binding peptide
GTPGPGGGSAISILYLGGGG

SEQ ID NO: 5252 - protein, 19 aa, Artificial Sequence
  Cyclic GFR-binding peptide
WWFWGSAISVLYLGGGGGG

SEQ ID NO: 5253 - protein, 17 aa, Artificial Sequence
  Cyclic GFR-binding peptide
GTPGPSSLSMLFFAAAA

SEQ ID NO: 5254 - protein, 20 aa, Artificial Sequence
  Cyclic GFR-binding peptide
WWFWGGSSLSVLFFAAAAAA

SEQ ID NO: 5255 - protein, 18 aa, Artificial Sequence
  Cyclic GFR-binding peptide
GTPGPGNAISMLYFGGGG

SEQ ID NO: 5256 - protein, 21 aa, Artificial Sequence
  Cyclic GFR-binding peptide
WWFWGGGNAISILYFGGGGGG

SEQ ID NO: 5257 - protein, 19 aa, Artificial Sequence
  Cyclic GFR-binding peptide
GTPGPGGSATSMLYYAAAA

SEQ ID NO: 5258 - protein, 22 aa, Artificial Sequence
  Cyclic GFR-binding peptide
WWFWGGGGSATSILYYAAAAAA

SEQ ID NO: 5259 - protein, 20 aa, Artificial Sequence
  Cyclic GFR-binding peptide
GTPGPGGGSPISMLYKGGGG

SEQ ID NO: 5260 - protein, 19 aa, Artificial Sequence
  Cyclic GFR-binding peptide
WWFWGSPISILYKGGGGGG

SEQ ID NO: 5261 - protein, 17 aa, Artificial Sequence
  Cyclic GFR-binding peptide
GTPGPEPISMLYLAAAA

SEQ ID NO: 5262 - protein, 20 aa, Artificial Sequence
  Cyclic GFR-binding peptide
WWFWGGEPISVLYLAAAAAA

SEQ ID NO: 5263 - protein, 18 aa, Artificial Sequence
  Cyclic GFR-binding peptide
GTPGPGSPINILYFGGGG

SEQ ID NO: 5264 - protein, 21 aa, Artificial Sequence
  Cyclic GFR-binding peptide
WWFWGGGSPINVLYFGGGGGG

SEQ ID NO: 5265 - protein, 19 aa, Artificial Sequence
  Cyclic GFR-binding peptide
GTPGPGGSPISMLYIAAAA

SEQ ID NO: 5266 - protein, 22 aa, Artificial Sequence
  Cyclic GFR-binding peptide
WWFWGGGGSPISVLYIAAAAAA

SEQ ID NO: 5267 - protein, 20 aa, Artificial Sequence
  Cyclic GFR-binding peptide
GTPGPGGGSPISMLFIGGGG

SEQ ID NO: 5268 - protein, 19 aa, Artificial Sequence
  Cyclic GFR-binding peptide
WWFWGSPISVLFIGGGGGG

SEQ ID NO: 5269 - protein, 17 aa, Artificial Sequence
  Cyclic GFR-binding peptide
GTPGPKPLSILYVAAAA

SEQ ID NO: 5270 - protein, 20 aa, Artificial Sequence
  Cyclic GFR-binding peptide
WWFWGGKPLSVLYVAAAAAA

SEQ ID NO: 5271 - protein, 18 aa, Artificial Sequence
  Cyclic GFR-binding peptide
GTPGPGEPLPMVYYGGGG

SEQ ID NO: 5272 - protein, 21 aa, Artificial Sequence
  Cyclic GFR-binding peptide
WWFWGGGEPLPVVYYGGGGGG

SEQ ID NO: 5273 - protein, 19 aa, Artificial Sequence
  Cyclic GFR-binding peptide
GTPGPGGEPLTMLYYAAAA

SEQ ID NO: 5274 - protein, 22 aa, Artificial Sequence
  Cyclic GFR-binding peptide
WWFWGGGGEPLTVLYYAAAAAA

SEQ ID NO: 5275 - protein, 20 aa, Artificial Sequence
  Cyclic GFR-binding peptide
GTPGPGGGSNITIQIMGGGG

SEQ ID NO: 5276 - protein, 19 aa, Artificial Sequence
  Cyclic GFR-binding peptide
WWFWGSNITVQIMGGGGGG

SEQ ID NO: 5277 - protein, 17 aa, Artificial Sequence
  Cyclic GFR-binding peptide
GTPGPRSVKMAKVAAAA

SEQ ID NO: 5278 - protein, 20 aa, Artificial Sequence
  Cyclic GFR-binding peptide
WWFWGGRSVKIAKVAAAAAA

SEQ ID NO: 5279 - protein, 18 aa, Artificial Sequence
  Cyclic GFR-binding peptide
GTPGPGRPVQMRKIGGGG

SEQ ID NO: 5280 - protein, 21 aa, Artificial Sequence
  Cyclic GFR-binding peptide
WWFWGGGRPVQIRKIGGGGGG

SEQ ID NO: 5281 - protein, 19 aa, Artificial Sequence
  Cyclic GFR-binding peptide
GTPGPGGSAISMLYLAAAA

SEQ ID NO: 5282 - protein, 22 aa, Artificial Sequence
  Cyclic GFR-binding peptide
WWFWGGGGSSLSILFFAAAAAA

SEQ ID NO: 5283 - protein, 20 aa, Artificial Sequence
  Cyclic GFR-binding peptide
GTPGPGGGNAISVLYFGGGG

SEQ ID NO: 5284 - protein, 19 aa, Artificial Sequence
  Cyclic GFR-binding peptide
WWFWGSATSVLYYGGGGGG

SEQ ID NO: 5285 - protein, 17 aa, Artificial Sequence
  Cyclic GFR-binding peptide
GTPGPSPISVLYKAAAA

SEQ ID NO: 5286 - protein, 20 aa, Artificial Sequence
  Cyclic GFR-binding peptide
WWFWGGEPISILYLAAAAAA

SEQ ID NO: 5287 - protein, 18 aa, Artificial Sequence
  Cyclic GFR-binding peptide
GTPGPGSPINMLYFGGGG

SEQ ID NO: 5288 - protein, 21 aa, Artificial Sequence
  Cyclic GFR-binding peptide
WWFWGGGSPISILYIGGGGGG

SEQ ID NO: 5289 - protein, 19 aa, Artificial Sequence
  Cyclic GFR-binding peptide
GTPGPGGSPISILFIAAAA

SEQ ID NO: 5290 - protein, 22 aa, Artificial Sequence
  Cyclic GFR-binding peptide
WWFWGGGGKPLSMLYVAAAAAA

SEQ ID NO: 5291 - protein, 20 aa, Artificial Sequence
  Cyclic GFR-binding peptide
GTPGPGGGEPLPIVYYGGGG

SEQ ID NO: 5292 - protein, 19 aa, Artificial Sequence
  Cyclic GFR-binding peptide
WWFWGEPLTILYYGGGGGG

SEQ ID NO: 5293 - protein, 17 aa, Artificial Sequence
  Cyclic GFR-binding peptide
GTPGPSNITMQIMAAAA

SEQ ID NO: 5294 - protein, 20 aa, Artificial Sequence
  Cyclic GFR-binding peptide
WWFWGGRSVKVAKVAAAAAA

SEQ ID NO: 5295 - protein, 18 aa, Artificial Sequence
  Cyclic GFR-binding peptide
GTPGPGRPVQVRKIGGGG

SEQ ID NO: 5296 - protein, 15 aa, Artificial Sequence
  Cyclic GFR-binding peptide
SAISILYLGGGGGGG

SEQ ID NO: 5297 - protein, 16 aa, Artificial Sequence
  Cyclic GFR-binding peptide
SAISVLYLGGGGGGGG

SEQ ID NO: 5298 - protein, 15 aa, Artificial Sequence
  Cyclic GFR-binding peptide
SSLSMLFFAAAAAAA

SEQ ID NO: 5299 - protein, 16 aa, Artificial Sequence
  Cyclic GFR-binding peptide
SSLSVLFFAAAAAAAA

SEQ ID NO: 5300 - protein, 15 aa, Artificial Sequence
  Cyclic GFR-binding peptide
NAISMLYFGGGGGGG

SEQ ID NO: 5301 - protein, 16 aa, Artificial Sequence
  Cyclic GFR-binding peptide
NAISILYFGGGGGGGG

SEQ ID NO: 5302 - protein, 15 aa, Artificial Sequence
  Cyclic GFR-binding peptide
SATSMLYYAAAAAAA

SEQ ID NO: 5303 - protein, 16 aa, Artificial Sequence
  Cyclic GFR-binding peptide
SATSILYYAAAAAAAA

SEQ ID NO: 5304 - protein, 15 aa, Artificial Sequence
  Cyclic GFR-binding peptide
SPISMLYKGGGGGGG

SEQ ID NO: 5305 - protein, 16 aa, Artificial Sequence
  Cyclic GFR-binding peptide
SPISILYKGGGGGGGG

SEQ ID NO: 5306 - protein, 15 aa, Artificial Sequence
  Cyclic GFR-binding peptide
EPISMLYLAAAAAAA

SEQ ID NO: 5307 - protein, 16 aa, Artificial Sequence
  Cyclic GFR-binding peptide
EPISVLYLAAAAAAAA

SEQ ID NO: 5308 - protein, 15 aa, Artificial Sequence
  Cyclic GFR-binding peptide
SPINILYFGGGGGGG

SEQ ID NO: 5309 - protein, 16 aa, Artificial Sequence
  Cyclic GFR-binding peptide
SPINVLYFGGGGGGGG

SEQ ID NO: 5310 - protein, 15 aa, Artificial Sequence
  Cyclic GFR-binding peptide
SPISMLYIAAAAAAA

SEQ ID NO: 5311 - protein, 16 aa, Artificial Sequence
  Cyclic GFR-binding peptide
SPISVLYIAAAAAAAA

SEQ ID NO: 5312 - protein, 15 aa, Artificial Sequence
  Cyclic GFR-binding peptide
SPISMLFIGGGGGGG

SEQ ID NO: 5313 - protein, 16 aa, Artificial Sequence
  Cyclic GFR-binding peptide
SPISVLFIGGGGGGGG

SEQ ID NO: 5314 - protein, 15 aa, Artificial Sequence
  Cyclic GFR-binding peptide
KPLSILYVAAAAAAA

SEQ ID NO: 5315 - protein, 16 aa, Artificial Sequence
  Cyclic GFR-binding peptide
KPLSVLYVAAAAAAAA

SEQ ID NO: 5316 - protein, 15 aa, Artificial Sequence
  Cyclic GFR-binding peptide
EPLPMVYYGGGGGGG

SEQ ID NO: 5317 - protein, 16 aa, Artificial Sequence
  Cyclic GFR-binding peptide
EPLPVVYYGGGGGGGG

SEQ ID NO: 5318 - protein, 15 aa, Artificial Sequence
  Cyclic GFR-binding peptide
EPLTMLYYAAAAAAA

SEQ ID NO: 5319 - protein, 16 aa, Artificial Sequence
  Cyclic GFR-binding peptide
EPLTVLYYAAAAAAAA

SEQ ID NO: 5320 - protein, 15 aa, Artificial Sequence
  Cyclic GFR-binding peptide
SNITIQIMGGGGGGG

SEQ ID NO: 5321 - protein, 16 aa, Artificial Sequence
  Cyclic GFR-binding peptide
SNITVQIMGGGGGGGG

SEQ ID NO: 5322 - protein, 15 aa, Artificial Sequence
  Cyclic GFR-binding peptide
RSVKMAKVAAAAAAA

SEQ ID NO: 5323 - protein, 16 aa, Artificial Sequence
  Cyclic GFR-binding peptide
RSVKIAKVAAAAAAAA

SEQ ID NO: 5324 - protein, 15 aa, Artificial Sequence
  Cyclic GFR-binding peptide
RPVQMRKIGGGGGGG

SEQ ID NO: 5325 - protein, 16 aa, Artificial Sequence
  Cyclic GFR-binding peptide
RPVQIRKIGGGGGGGG

SEQ ID NO: 5326 - protein, 15 aa, Artificial Sequence
  Cyclic GFR-binding peptide
SAISMLYLAAAAAAA

SEQ ID NO: 5327 - protein, 16 aa, Artificial Sequence
  Cyclic GFR-binding peptide
SSLSILFFAAAAAAAA

SEQ ID NO: 5328 - protein, 15 aa, Artificial Sequence
  Cyclic GFR-binding peptide
NAISVLYFGGGGGGG

SEQ ID NO: 5329 - protein, 16 aa, Artificial Sequence
  Cyclic GFR-binding peptide
SATSVLYYGGGGGGGG

SEQ ID NO: 5330 - protein, 15 aa, Artificial Sequence
  Cyclic GFR-binding peptide
SPISVLYKAAAAAAA

SEQ ID NO: 5331 - protein, 16 aa, Artificial Sequence
  Cyclic GFR-binding peptide
EPISILYLAAAAAAAA

SEQ ID NO: 5332 - protein, 15 aa, Artificial Sequence
  Cyclic GFR-binding peptide
SPINMLYFGGGGGGG

SEQ ID NO: 5333 - protein, 16 aa, Artificial Sequence
  Cyclic GFR-binding peptide
SPISILYIGGGGGGGG

SEQ ID NO: 5334 - protein, 15 aa, Artificial Sequence
  Cyclic GFR-binding peptide
SPISILFIAAAAAAA

SEQ ID NO: 5335 - protein, 16 aa, Artificial Sequence
  Cyclic GFR-binding peptide
KPLSMLYVAAAAAAAA

SEQ ID NO: 5336 - protein, 15 aa, Artificial Sequence
  Cyclic GFR-binding peptide
EPLPIVYYGGGGGGG

SEQ ID NO: 5337 - protein, 16 aa, Artificial Sequence
  Cyclic GFR-binding peptide
EPLTILYYGGGGGGGG

SEQ ID NO: 5338 - protein, 15 aa, Artificial Sequence
  Cyclic GFR-binding peptide
SNITMQIMAAAAAAA

SEQ ID NO: 5339 - protein, 16 aa, Artificial Sequence
  Cyclic GFR-binding peptide
RSVKVAKVAAAAAAAA

SEQ ID NO: 5340 - protein, 15 aa, Artificial Sequence
  Cyclic GFR-binding peptide
RPVQVRKIGGGGGGG

SEQ ID NO: 5341 - protein, 27 aa, Artificial Sequence
  Cyclic GFR-binding peptide
RIKPHVPTKMSAISMLYLDENEKGGGG

SEQ ID NO: 5342 - protein, 29 aa, Artificial Sequence
  Cyclic GFR-binding peptide
EYVRKVPTKLSAISMLYLDENKNGGGGGG

SEQ ID NO: 5343 - protein, 27 aa, Artificial Sequence
  Cyclic GFR-binding peptide
EIVRKVPTQLSAISMLYLDEYDKAAAA

SEQ ID NO: 5344 - protein, 29 aa, Artificial Sequence
  Cyclic GFR-binding peptide
DENEKVPTRLSAISMLYLDDSSNAAAAAA

SEQ ID NO: 5345 - protein, 27 aa, Artificial Sequence
  Cyclic GFR-binding peptide
DENKNVPTKTSAISMLYLDDSSNGGGG

SEQ ID NO: 5346 - protein, 29 aa, Artificial Sequence
  Cyclic GFR-binding peptide
DEYDKVPTALSAISMLYLDDSSNGGGGGG

SEQ ID NO: 5347 - protein, 27 aa, Artificial Sequence
  Cyclic GFR-binding peptide
DDSSNVPTDLSAISMLYLDSSNNAAAA

SEQ ID NO: 5348 - protein, 29 aa, Artificial Sequence
  Cyclic GFR-binding peptide
DDSSNVPEKMSAISMLYLDDMGVAAAAAA

SEQ ID NO: 5349 - protein, 27 aa, Artificial Sequence
  Cyclic GFR-binding peptide
DDSSNAPTKLSAISMLYLDKGVVGGGG

SEQ ID NO: 5350 - protein, 29 aa, Artificial Sequence
  Cyclic GFR-binding peptide
DSSNNAPTQLSAISMLYLNDKQQGGGGGG

SEQ ID NO: 5351 - protein, 27 aa, Artificial Sequence
  Cyclic GFR-binding peptide
DDMGVTPTKMSAISMLYLDAANNAAAA

SEQ ID NO: 5352 - protein, 29 aa, Artificial Sequence
  Cyclic GFR-binding peptide
DKGVVVPARLSAISMLYLDSANNAAAAAA

SEQ ID NO: 5353 - protein, 27 aa, Artificial Sequence
  Cyclic GFR-binding peptide
NDKQQAPVKTSAISMLYLDDSSNGGGG

SEQ ID NO: 5354 - protein, 29 aa, Artificial Sequence
  Cyclic GFR-binding peptide
DAANNVPQALSAISMLYLDNGRVGGGGGG

SEQ ID NO: 5355 - protein, 27 aa, Artificial Sequence
  Cyclic GFR-binding peptide
DSANNVSQDLSAISMLYLVGRKPAAAA

SEQ ID NO: 5356 - protein, 29 aa, Artificial Sequence
  Cyclic GFR-binding peptide
DDSSNVPQDLSAISMLYLIGKTPAAAAAA

SEQ ID NO: 5357 - protein, 27 aa, Artificial Sequence
  Cyclic GFR-binding peptide
DNGRVSRVHHSAISMLYLVGRTPGGGG

SEQ ID NO: 5358 - protein, 29 aa, Artificial Sequence
  Cyclic GFR-binding peptide
VGRKPTQVQLSAISMLYLRIKPHGGGGGG

SEQ ID NO: 5359 - protein, 27 aa, Artificial Sequence
  Cyclic GFR-binding peptide
IGKTPVPEELSSLSILFFRIKPHAAAA

SEQ ID NO: 5360 - protein, 29 aa, Artificial Sequence
  Cyclic GFR-binding peptide
VGRTPVPEKLSSLSILFFRIKPHAAAAAA

SEQ ID NO: 5361 - protein, 27 aa, Artificial Sequence
  Cyclic GFR-binding peptide
RIKPHVPEQLSSLSILFFRIKPHGGGG

SEQ ID NO: 5362 - protein, 29 aa, Artificial Sequence
  Cyclic GFR-binding peptide
RIKPHVPEKMSSLSILFFEYVRKGGGGGG

SEQ ID NO: 5363 - protein, 27 aa, Artificial Sequence
  Cyclic GFR-binding peptide
RIKPHVPERLSSLSILFFEIVRKAAAA

SEQ ID NO: 5364 - protein, 27 aa, Artificial Sequence
  Cyclic GFR-binding peptide
DENEKVPEKTSSLSILFFDENEKGGGG

SEQ ID NO: 5365 - protein, 29 aa, Artificial Sequence
  Cyclic GFR-binding peptide
DENKNVPEALSSLSILFFDENKNGGGGGG

SEQ ID NO: 5366 - protein, 27 aa, Artificial Sequence
  Cyclic GFR-binding peptide
DEYDKVPEDLSSLSILFFDEYDKAAAA

SEQ ID NO: 5367 - protein, 29 aa, Artificial Sequence
  Cyclic GFR-binding peptide
DDSSNVPTELSSLSILFFDDSSNAAAAAA

SEQ ID NO: 5368 - protein, 27 aa, Artificial Sequence
  Cyclic GFR-binding peptide
DDSSNAPTKLSSLSILFFDDSSNGGGG

SEQ ID NO: 5369 - protein, 29 aa, Artificial Sequence
  Cyclic GFR-binding peptide
DDSSNAPTQLSSLSILFFDDSSNGGGGGG

SEQ ID NO: 5370 - protein, 27 aa, Artificial Sequence
  Cyclic GFR-binding peptide
DSSNNVPTKLSSLSILFFDSSNNAAAA

SEQ ID NO: 5371 - protein, 29 aa, Artificial Sequence
  Cyclic GFR-binding peptide
DDMGVTPTKMSSLSILFFDDMGVAAAAAA

SEQ ID NO: 5372 - protein, 27 aa, Artificial Sequence
  Cyclic GFR-binding peptide
DKGVVVPARLSSLSILFFDKGVVGGGG

SEQ ID NO: 5373 - protein, 29 aa, Artificial Sequence
  Cyclic GFR-binding peptide
NDKQQVPTRLSSLSILFFNDKQQGGGGGG

SEQ ID NO: 5374 - protein, 27 aa, Artificial Sequence
  Cyclic GFR-binding peptide
DAANNAPVKTSSLSILFFDAANNAAAA

SEQ ID NO: 5375 - protein, 29 aa, Artificial Sequence
  Cyclic GFR-binding peptide
DSANNVPQALSSLSILFFDSANNAAAAAA

SEQ ID NO: 5376 - protein, 27 aa, Artificial Sequence
  Cyclic GFR-binding peptide
DDSSNVSQDLSSLSILFFDDSSNGGGG

SEQ ID NO: 5377 - protein, 29 aa, Artificial Sequence
  Cyclic GFR-binding peptide
DNGRVVPQDLSSLSILFFDNGRVGGGGGG

SEQ ID NO: 5378 - protein, 27 aa, Artificial Sequence
  Cyclic GFR-binding peptide
VGRKPVPTEESSLSILFFVGRKPAAAA

SEQ ID NO: 5379 - protein, 29 aa, Artificial Sequence
  Cyclic GFR-binding peptide
IGKTPVPTGQSSLSILFFIGKTPAAAAAA

SEQ ID NO: 5380 - protein, 27 aa, Artificial Sequence
  Cyclic GFR-binding peptide
VGRTPSRVHHSSLSILFFVGRTPGGGG

SEQ ID NO: 5381 - protein, 29 aa, Artificial Sequence
  Cyclic GFR-binding peptide
RIKPHTQVQLSSLSILFFRIKPHGGGGGG

SEQ ID NO: 5382 - protein, 27 aa, Artificial Sequence
  Cyclic GFR-binding peptide
RIKPHAPTELNAISVLYFRIKPHAAAA

SEQ ID NO: 5383 - protein, 29 aa, Artificial Sequence
  Cyclic GFR-binding peptide
RIKPHAPTKMNAISVLYFRIKPHAAAAAA

SEQ ID NO: 5384 - protein, 27 aa, Artificial Sequence
  Cyclic GFR-binding peptide
RIKPHAPTKLNAISVLYFRIKPHGGGG

SEQ ID NO: 5385 - protein, 29 aa, Artificial Sequence
  Cyclic GFR-binding peptide
EYVRKAPTRLNAISVLYFEYVRKGGGGGG

SEQ ID NO: 5386 - protein, 27 aa, Artificial Sequence
  Cyclic GFR-binding peptide
EIVRKAPTKTNAISVLYFEIVRKAAAA

SEQ ID NO: 5387 - protein, 27 aa, Artificial Sequence
  Cyclic GFR-binding peptide
DENEKAPTALNAISVLYFDENEKGGGG

SEQ ID NO: 5388 - protein, 29 aa, Artificial Sequence
  Cyclic GFR-binding peptide
DENKNAPTDLNAISVLYFDENKNGGGGGG

SEQ ID NO: 5389 - protein, 27 aa, Artificial Sequence
  Cyclic GFR-binding peptide
DEYDKVPTELNAISVLYFDEYDKAAAA

SEQ ID NO: 5390 - protein, 29 aa, Artificial Sequence
  Cyclic GFR-binding peptide
DDSSNVPEKMNAISVLYFDDSSNAAAAAA

SEQ ID NO: 5391 - protein, 27 aa, Artificial Sequence
  Cyclic GFR-binding peptide
DDSSNVPTKLNAISVLYFDDSSNGGGG

SEQ ID NO: 5392 - protein, 29 aa, Artificial Sequence
  Cyclic GFR-binding peptide
DDSSNTPTKMNAISVLYFDDSSNGGGGGG

SEQ ID NO: 5393 - protein, 27 aa, Artificial Sequence
  Cyclic GFR-binding peptide
DSSNNVPARLNAISVLYFDSSNNAAAA

SEQ ID NO: 5394 - protein, 29 aa, Artificial Sequence
  Cyclic GFR-binding peptide
DDMGVVPTRLNAISVLYFDDMGVAAAAAA

SEQ ID NO: 5395 - protein, 27 aa, Artificial Sequence
  Cyclic GFR-binding peptide
DKGVVAPVKTNAISVLYFDKGVVGGGG

SEQ ID NO: 5396 - protein, 29 aa, Artificial Sequence
  Cyclic GFR-binding peptide
NDKQQVPQALNAISVLYFNDKQQGGGGGG

SEQ ID NO: 5397 - protein, 27 aa, Artificial Sequence
  Cyclic GFR-binding peptide
DAANNVSQDLNAISVLYFDAANNAAAA

SEQ ID NO: 5398 - protein, 29 aa, Artificial Sequence
  Cyclic GFR-binding peptide
DSANNVPQDLNAISVLYFDSANNAAAAAA

SEQ ID NO: 5399 - protein, 27 aa, Artificial Sequence
  Cyclic GFR-binding peptide
DDSSNVPTEENAISVLYFDDSSNGGGG

SEQ ID NO: 5400 - protein, 29 aa, Artificial Sequence
  Cyclic GFR-binding peptide
DNGRVVPTGQNAISVLYFDNGRVGGGGGG

SEQ ID NO: 5401 - protein, 27 aa, Artificial Sequence
  Cyclic GFR-binding peptide
VGRKPSRVHHNAISVLYFVGRKPAAAA

SEQ ID NO: 5402 - protein, 29 aa, Artificial Sequence
  Cyclic GFR-binding peptide
IGKTPTQVQLNAISVLYFIGKTPAAAAAA

SEQ ID NO: 5403 - protein, 27 aa, Artificial Sequence
  Cyclic GFR-binding peptide
VGRTPAPTELSATSVLYYVGRTPGGGG

SEQ ID NO: 5404 - protein, 29 aa, Artificial Sequence
  Cyclic GFR-binding peptide
RIKPHAPTKMSATSVLYYRIKPHGGGGGG

SEQ ID NO: 5405 - protein, 27 aa, Artificial Sequence
  Cyclic GFR-binding peptide
RIKPHAPTKLSATSVLYYRIKPHAAAA

SEQ ID NO: 5406 - protein, 29 aa, Artificial Sequence
  Cyclic GFR-binding peptide
RIKPHAPTQLSATSVLYYRIKPHAAAAAA

SEQ ID NO: 5407 - protein, 27 aa, Artificial Sequence
  Cyclic GFR-binding peptide
RIKPHAPTRLSATSVLYYRIKPHGGGG

SEQ ID NO: 5408 - protein, 29 aa, Artificial Sequence
  Cyclic GFR-binding peptide
EYVRKAPTKTSATSVLYYEYVRKGGGGGG

SEQ ID NO: 5409 - protein, 27 aa, Artificial Sequence
  Cyclic GFR-binding peptide
EIVRKAPTALSATSVLYYEIVRKAAAA

SEQ ID NO: 5410 - protein, 27 aa, Artificial Sequence
  Cyclic GFR-binding peptide
DENEKAPTDLSATSVLYYDENEKGGGG

SEQ ID NO: 5411 - protein, 29 aa, Artificial Sequence
  Cyclic GFR-binding peptide
DENKNVPTELSATSVLYYDENKNGGGGGG

SEQ ID NO: 5412 - protein, 27 aa, Artificial Sequence
  Cyclic GFR-binding peptide
DEYDKVPEKMSATSVLYYDEYDKAAAA

SEQ ID NO: 5413 - protein, 29 aa, Artificial Sequence
  Cyclic GFR-binding peptide
DDSSNVPTKLSATSVLYYDDSSNAAAAAA

SEQ ID NO: 5414 - protein, 27 aa, Artificial Sequence
  Cyclic GFR-binding peptide
DDSSNTPTKMSATSVLYYDDSSNGGGG

SEQ ID NO: 5415 - protein, 29 aa, Artificial Sequence
  Cyclic GFR-binding peptide
DDSSNVPARLSATSVLYYDDSSNGGGGGG

SEQ ID NO: 5416 - protein, 27 aa, Artificial Sequence
  Cyclic GFR-binding peptide
DSSNNVPTRLSATSVLYYDSSNNAAAA

SEQ ID NO: 5417 - protein, 29 aa, Artificial Sequence
  Cyclic GFR-binding peptide
DDMGVAPVKTSATSVLYYDDMGVAAAAAA

SEQ ID NO: 5418 - protein, 27 aa, Artificial Sequence
  Cyclic GFR-binding peptide
DKGVVVPQALSATSVLYYDKGVVGGGG

SEQ ID NO: 5419 - protein, 29 aa, Artificial Sequence
  Cyclic GFR-binding peptide
NDKQQVSQDLSATSVLYYNDKQQGGGGGG

SEQ ID NO: 5420 - protein, 27 aa, Artificial Sequence
  Cyclic GFR-binding peptide
DAANNVPQDLSATSVLYYDAANNAAAA

SEQ ID NO: 5421 - protein, 29 aa, Artificial Sequence
  Cyclic GFR-binding peptide
DSANNVPTEESATSVLYYDSANNAAAAAA

SEQ ID NO: 5422 - protein, 27 aa, Artificial Sequence
  Cyclic GFR-binding peptide
DDSSNVPTGQSATSVLYYDDSSNGGGG

SEQ ID NO: 5423 - protein, 29 aa, Artificial Sequence
  Cyclic GFR-binding peptide
DNGRVSRVHHSATSVLYYDNGRVGGGGGG

SEQ ID NO: 5424 - protein, 27 aa, Artificial Sequence
  Cyclic GFR-binding peptide
VGRKPTQVQLSATSVLYYVGRKPAAAA

SEQ ID NO: 5425 - protein, 29 aa, Artificial Sequence
  Cyclic GFR-binding peptide
IGKTPVPTELSPISVLYKIGKTPAAAAAA

SEQ ID NO: 5426 - protein, 27 aa, Artificial Sequence
  Cyclic GFR-binding peptide
VGRTPVPTKMSPISVLYKVGRTPGGGG

SEQ ID NO: 5427 - protein, 29 aa, Artificial Sequence
  Cyclic GFR-binding peptide
RIKPHVPTKLSPISVLYKRIKPHGGGGGG

SEQ ID NO: 5428 - protein, 27 aa, Artificial Sequence
  Cyclic GFR-binding peptide
RIKPHVPTQLSPISVLYKRIKPHAAAA

SEQ ID NO: 5429 - protein, 29 aa, Artificial Sequence
  Cyclic GFR-binding peptide
RIKPHVPTRLSPISVLYKRIKPHAAAAAA

SEQ ID NO: 5430 - protein, 27 aa, Artificial Sequence
  Cyclic GFR-binding peptide
RIKPHVPTKTSPISVLYKRIKPHGGGG

SEQ ID NO: 5431 - protein, 29 aa, Artificial Sequence
  Cyclic GFR-binding peptide
EYVRKVPTALSPISVLYKEYVRKGGGGGG

SEQ ID NO: 5432 - protein, 27 aa, Artificial Sequence
  Cyclic GFR-binding peptide
EIVRKVPTDLSPISVLYKEIVRKAAAA

SEQ ID NO: 5433 - protein, 27 aa, Artificial Sequence
  Cyclic GFR-binding peptide
DENEKVPEKMSPISVLYKDENEKGGGG

SEQ ID NO: 5434 - protein, 29 aa, Artificial Sequence
  Cyclic GFR-binding peptide
DENKNAPTKLSPISVLYKDENKNGGGGGG

SEQ ID NO: 5435 - protein, 27 aa, Artificial Sequence
  Cyclic GFR-binding peptide
DEYDKAPTQLSPISVLYKDEYDKAAAA

SEQ ID NO: 5436 - protein, 29 aa, Artificial Sequence
  Cyclic GFR-binding peptide
DDSSNTPTKMSPISVLYKDDSSNAAAAAA

SEQ ID NO: 5437 - protein, 27 aa, Artificial Sequence
  Cyclic GFR-binding peptide
DDSSNVPARLSPISVLYKDDSSNGGGG

SEQ ID NO: 5438 - protein, 29 aa, Artificial Sequence
  Cyclic GFR-binding peptide
DDSSNAPVKTSPISVLYKDDSSNGGGGGG

SEQ ID NO: 5439 - protein, 27 aa, Artificial Sequence
  Cyclic GFR-binding peptide
DSSNNVPQALSPISVLYKDSSNNAAAA

SEQ ID NO: 5440 - protein, 29 aa, Artificial Sequence
  Cyclic GFR-binding peptide
DDMGVVSQDLSPISVLYKDDMGVAAAAAA

SEQ ID NO: 5441 - protein, 27 aa, Artificial Sequence
  Cyclic GFR-binding peptide
DKGVVVPQDLSPISVLYKDKGVVGGGG

SEQ ID NO: 5442 - protein, 29 aa, Artificial Sequence
  Cyclic GFR-binding peptide
NDKQQSRVHHSPISVLYKNDKQQGGGGGG

SEQ ID NO: 5443 - protein, 27 aa, Artificial Sequence
  Cyclic GFR-binding peptide
DAANNTQVQLSPISVLYKDAANNAAAA

SEQ ID NO: 5444 - protein, 29 aa, Artificial Sequence
  Cyclic GFR-binding peptide
DSANNVPTELEPISILYLDSANNAAAAAA

SEQ ID NO: 5445 - protein, 27 aa, Artificial Sequence
  Cyclic GFR-binding peptide
DDSSNVPTKMEPISILYLDDSSNGGGG

SEQ ID NO: 5446 - protein, 29 aa, Artificial Sequence
  Cyclic GFR-binding peptide
DNGRVVPTKLEPISILYLDNGRVGGGGGG

SEQ ID NO: 5447 - protein, 27 aa, Artificial Sequence
  Cyclic GFR-binding peptide
VGRKPVPTQLEPISILYLVGRKPAAAA

SEQ ID NO: 5448 - protein, 29 aa, Artificial Sequence
  Cyclic GFR-binding peptide
IGKTPVPTRLEPISILYLIGKTPAAAAAA

SEQ ID NO: 5449 - protein, 27 aa, Artificial Sequence
  Cyclic GFR-binding peptide
VGRTPVPTKTEPISILYLVGRTPGGGG

SEQ ID NO: 5450 - protein, 29 aa, Artificial Sequence
  Cyclic GFR-binding peptide
RIKPHVPTALEPISILYLRIKPHGGGGGG

SEQ ID NO: 5451 - protein, 27 aa, Artificial Sequence
  Cyclic GFR-binding peptide
RIKPHVPTDLEPISILYLRIKPHAAAA

SEQ ID NO: 5452 - protein, 29 aa, Artificial Sequence
  Cyclic GFR-binding peptide
RIKPHVPEKMEPISILYLRIKPHAAAAAA

SEQ ID NO: 5453 - protein, 27 aa, Artificial Sequence
  Cyclic GFR-binding peptide
RIKPHAPTKLEPISILYLRIKPHGGGG

SEQ ID NO: 5454 - protein, 29 aa, Artificial Sequence
  Cyclic GFR-binding peptide
EYVRKAPTQLEPISILYLEYVRKGGGGGG

SEQ ID NO: 5455 - protein, 27 aa, Artificial Sequence
  Cyclic GFR-binding peptide
EIVRKTPTKMEPISILYLEIVRKAAAA

SEQ ID NO: 5456 - protein, 27 aa, Artificial Sequence
  Cyclic GFR-binding peptide
DENEKVPARLEPISILYLDENEKGGGG

SEQ ID NO: 5457 - protein, 29 aa, Artificial Sequence
  Cyclic GFR-binding peptide
DENKNAPVKTEPISILYLDENKNGGGGGG

SEQ ID NO: 5458 - protein, 27 aa, Artificial Sequence
  Cyclic GFR-binding peptide
DEYDKVPQALEPISILYLDEYDKAAAA

SEQ ID NO: 5459 - protein, 29 aa, Artificial Sequence
  Cyclic GFR-binding peptide
DDSSNVSQDLEPISILYLDDSSNAAAAAA

SEQ ID NO: 5460 - protein, 27 aa, Artificial Sequence
  Cyclic GFR-binding peptide
DDSSNVPQDLEPISILYLDDSSNGGGG

SEQ ID NO: 5461 - protein, 29 aa, Artificial Sequence
  Cyclic GFR-binding peptide
DDSSNSRVHHEPISILYLDDSSNGGGGGG

SEQ ID NO: 5462 - protein, 27 aa, Artificial Sequence
  Cyclic GFR-binding peptide
DSSNNTQVQLEPISILYLDSSNNAAAA

SEQ ID NO: 5463 - protein, 29 aa, Artificial Sequence
  Cyclic GFR-binding peptide
DDMGVTPTELSPINMLYFDDMGVAAAAAA

SEQ ID NO: 5464 - protein, 27 aa, Artificial Sequence
  Cyclic GFR-binding peptide
DKGVVTPTKMSPINMLYFDKGVVGGGG

SEQ ID NO: 5465 - protein, 29 aa, Artificial Sequence
  Cyclic GFR-binding peptide
NDKQQTPTKLSPINMLYFNDKQQGGGGGG

SEQ ID NO: 5466 - protein, 27 aa, Artificial Sequence
  Cyclic GFR-binding peptide
DAANNTPTQLSPINMLYFDAANNAAAA

SEQ ID NO: 5467 - protein, 29 aa, Artificial Sequence
  Cyclic GFR-binding peptide
DSANNTPTRLSPINMLYFDSANNAAAAAA

SEQ ID NO: 5468 - protein, 27 aa, Artificial Sequence
  Cyclic GFR-binding peptide
DDSSNTPTKTSPINMLYFDDSSNGGGG

SEQ ID NO: 5469 - protein, 29 aa, Artificial Sequence
  Cyclic GFR-binding peptide
DNGRVTPTALSPINMLYFDNGRVGGGGGG

SEQ ID NO: 5470 - protein, 27 aa, Artificial Sequence
  Cyclic GFR-binding peptide
VGRKPTPTDLSPINMLYFVGRKPAAAA

SEQ ID NO: 5471 - protein, 29 aa, Artificial Sequence
  Cyclic GFR-binding peptide
IGKTPVPTELSPINMLYFIGKTPAAAAAA

SEQ ID NO: 5472 - protein, 27 aa, Artificial Sequence
  Cyclic GFR-binding peptide
VGRTPVPEKMSPINMLYFVGRTPGGGG

SEQ ID NO: 5473 - protein, 29 aa, Artificial Sequence
  Cyclic GFR-binding peptide
RIKPHAPTKLSPINMLYFRIKPHGGGGGG

SEQ ID NO: 5474 - protein, 27 aa, Artificial Sequence
  Cyclic GFR-binding peptide
RIKPHAPTQLSPINMLYFRIKPHAAAA

SEQ ID NO: 5475 - protein, 29 aa, Artificial Sequence
  Cyclic GFR-binding peptide
RIKPHVPTKLSPINMLYFRIKPHAAAAAA

SEQ ID NO: 5476 - protein, 27 aa, Artificial Sequence
  Cyclic GFR-binding peptide
RIKPHVPARLSPINMLYFRIKPHGGGG

SEQ ID NO: 5477 - protein, 29 aa, Artificial Sequence
  Cyclic GFR-binding peptide
EYVRKVPTRLSPINMLYFEYVRKGGGGGG

SEQ ID NO: 5478 - protein, 27 aa, Artificial Sequence
  Cyclic GFR-binding peptide
EIVRKAPVKTSPINMLYFEIVRKAAAA

SEQ ID NO: 5479 - protein, 27 aa, Artificial Sequence
  Cyclic GFR-binding peptide
DENEKVPQALSPINMLYFDENEKGGGG

SEQ ID NO: 5480 - protein, 29 aa, Artificial Sequence
  Cyclic GFR-binding peptide
DENKNVSQDLSPINMLYFDENKNGGGGGG

SEQ ID NO: 5481 - protein, 27 aa, Artificial Sequence
  Cyclic GFR-binding peptide
DEYDKVPQDLSPINMLYFDEYDKAAAA

SEQ ID NO: 5482 - protein, 29 aa, Artificial Sequence
  Cyclic GFR-binding peptide
DDSSNVPTEESPINMLYFDDSSNAAAAAA

SEQ ID NO: 5483 - protein, 27 aa, Artificial Sequence
  Cyclic GFR-binding peptide
DDSSNVPTGQSPINMLYFDDSSNGGGG

SEQ ID NO: 5484 - protein, 29 aa, Artificial Sequence
  Cyclic GFR-binding peptide
DDSSNSRVHHSPINMLYFDDSSNGGGGGG

SEQ ID NO: 5485 - protein, 27 aa, Artificial Sequence
  Cyclic GFR-binding peptide
DSSNNTQVQLSPINMLYFDSSNNAAAA

SEQ ID NO: 5486 - protein, 29 aa, Artificial Sequence
  Cyclic GFR-binding peptide
DDMGVVPAELSPISILYIDDMGVAAAAAA

SEQ ID NO: 5487 - protein, 27 aa, Artificial Sequence
  Cyclic GFR-binding peptide
DKGVVVPAKMSPISILYIDKGVVGGGG

SEQ ID NO: 5488 - protein, 29 aa, Artificial Sequence
  Cyclic GFR-binding peptide
NDKQQVPAKLSPISILYINDKQQGGGGGG

SEQ ID NO: 5489 - protein, 27 aa, Artificial Sequence
  Cyclic GFR-binding peptide
DAANNVPAQLSPISILYIDAANNAAAA

SEQ ID NO: 5490 - protein, 29 aa, Artificial Sequence
  Cyclic GFR-binding peptide
DSANNVPARLSPISILYIDSANNAAAAAA

SEQ ID NO: 5491 - protein, 27 aa, Artificial Sequence
  Cyclic GFR-binding peptide
DDSSNVPAKTSPISILYIDDSSNGGGG

SEQ ID NO: 5492 - protein, 29 aa, Artificial Sequence
  Cyclic GFR-binding peptide
DNGRVVPAALSPISILYIDNGRVGGGGGG

SEQ ID NO: 5493 - protein, 27 aa, Artificial Sequence
  Cyclic GFR-binding peptide
VGRKPVPADLSPISILYIVGRKPAAAA

SEQ ID NO: 5494 - protein, 29 aa, Artificial Sequence
  Cyclic GFR-binding peptide
IGKTPVPTELSPISILYIIGKTPAAAAAA

SEQ ID NO: 5495 - protein, 27 aa, Artificial Sequence
  Cyclic GFR-binding peptide
VGRTPVPEKMSPISILYIVGRTPGGGG

SEQ ID NO: 5496 - protein, 29 aa, Artificial Sequence
  Cyclic GFR-binding peptide
RIKPHAPTKLSPISILYIRIKPHGGGGGG

SEQ ID NO: 5497 - protein, 27 aa, Artificial Sequence
  Cyclic GFR-binding peptide
RIKPHAPTQLSPISILYIRIKPHAAAA

SEQ ID NO: 5498 - protein, 29 aa, Artificial Sequence
  Cyclic GFR-binding peptide
RIKPHVPTKLSPISILYIRIKPHAAAAAA

SEQ ID NO: 5499 - protein, 27 aa, Artificial Sequence
  Cyclic GFR-binding peptide
RIKPHTPTKMSPISILYIRIKPHGGGG

SEQ ID NO: 5500 - protein, 29 aa, Artificial Sequence
  Cyclic GFR-binding peptide
EYVRKVPTRLSPISILYIEYVRKGGGGGG

SEQ ID NO: 5501 - protein, 27 aa, Artificial Sequence
  Cyclic GFR-binding peptide
EIVRKAPVKTSPISILYIEIVRKAAAA

SEQ ID NO: 5502 - protein, 27 aa, Artificial Sequence
  Cyclic GFR-binding peptide
DENEKVPQALSPISILYIDENEKGGGG

SEQ ID NO: 5503 - protein, 29 aa, Artificial Sequence
  Cyclic GFR-binding peptide
DENKNVSQDLSPISILYIDENKNGGGGGG

SEQ ID NO: 5504 - protein, 27 aa, Artificial Sequence
  Cyclic GFR-binding peptide
DEYDKVPQDLSPISILYIDEYDKAAAA

SEQ ID NO: 5505 - protein, 29 aa, Artificial Sequence
  Cyclic GFR-binding peptide
DDSSNVPTEESPISILYIDDSSNAAAAAA

SEQ ID NO: 5506 - protein, 27 aa, Artificial Sequence
  Cyclic GFR-binding peptide
DDSSNVPTGQSPISILYIDDSSNGGGG

SEQ ID NO: 5507 - protein, 29 aa, Artificial Sequence
  Cyclic GFR-binding peptide
DDSSNSRVHHSPISILYIDDSSNGGGGGG

SEQ ID NO: 5508 - protein, 27 aa, Artificial Sequence
  Cyclic GFR-binding peptide
DSSNNTQVQLSPISILYIDSSNNAAAA

SEQ ID NO: 5509 - protein, 29 aa, Artificial Sequence
  Cyclic GFR-binding peptide
DDMGVVPTELSPISILFIDDMGVAAAAAA

SEQ ID NO: 5510 - protein, 27 aa, Artificial Sequence
  Cyclic GFR-binding peptide
DKGVVVPTKMSPISILFIDKGVVGGGG

SEQ ID NO: 5511 - protein, 29 aa, Artificial Sequence
  Cyclic GFR-binding peptide
NDKQQVPTKLSPISILFINDKQQGGGGGG

SEQ ID NO: 5512 - protein, 27 aa, Artificial Sequence
  Cyclic GFR-binding peptide
DAANNVPTQLSPISILFIDAANNAAAA

SEQ ID NO: 5513 - protein, 29 aa, Artificial Sequence
  Cyclic GFR-binding peptide
DSANNVPTRLSPISILFIDSANNAAAAAA

SEQ ID NO: 5514 - protein, 27 aa, Artificial Sequence
  Cyclic GFR-binding peptide
DDSSNVPTKTSPISILFIDDSSNGGGG

SEQ ID NO: 5515 - protein, 29 aa, Artificial Sequence
  Cyclic GFR-binding peptide
DNGRVVPTALSPISILFIDNGRVGGGGGG

SEQ ID NO: 5516 - protein, 27 aa, Artificial Sequence
  Cyclic GFR-binding peptide
VGRKPVPTDLSPISILFIVGRKPAAAA

SEQ ID NO: 5517 - protein, 29 aa, Artificial Sequence
  Cyclic GFR-binding peptide
IGKTPVPEKMSPISILFIIGKTPAAAAAA

SEQ ID NO: 5518 - protein, 27 aa, Artificial Sequence
  Cyclic GFR-binding peptide
VGRTPAPTKLSPISILFIVGRTPGGGG

SEQ ID NO: 5519 - protein, 29 aa, Artificial Sequence
  Cyclic GFR-binding peptide
RIKPHAPTQLSPISILFIRIKPHGGGGGG

SEQ ID NO: 5520 - protein, 27 aa, Artificial Sequence
  Cyclic GFR-binding peptide
RIKPHTPTKMSPISILFIRIKPHAAAA

SEQ ID NO: 5521 - protein, 29 aa, Artificial Sequence
  Cyclic GFR-binding peptide
RIKPHVPARLSPISILFIRIKPHAAAAAA

SEQ ID NO: 5522 - protein, 27 aa, Artificial Sequence
  Cyclic GFR-binding peptide
RIKPHAPVKTSPISILFIRIKPHGGGG

SEQ ID NO: 5523 - protein, 29 aa, Artificial Sequence
  Cyclic GFR-binding peptide
EYVRKVPQALSPISILFIEYVRKGGGGGG

SEQ ID NO: 5524 - protein, 27 aa, Artificial Sequence
  Cyclic GFR-binding peptide
EIVRKVSQDLSPISILFIEIVRKAAAA

SEQ ID NO: 5525 - protein, 27 aa, Artificial Sequence
  Cyclic GFR-binding peptide
DENEKVPQDLSPISILFIDENEKGGGG

SEQ ID NO: 5526 - protein, 29 aa, Artificial Sequence
  Cyclic GFR-binding peptide
DENKNSRVHHSPISILFIDENKNGGGGGG

SEQ ID NO: 5527 - protein, 27 aa, Artificial Sequence
  Cyclic GFR-binding peptide
DEYDKTQVQLSPISILFIDEYDKAAAA

SEQ ID NO: 5528 - protein, 29 aa, Artificial Sequence
  Cyclic GFR-binding peptide
DDSSNAPVELKPLSMLYVDDSSNAAAAAA

SEQ ID NO: 5529 - protein, 27 aa, Artificial Sequence
  Cyclic GFR-binding peptide
DDSSNAPVKMKPLSMLYVDDSSNGGGG

SEQ ID NO: 5530 - protein, 29 aa, Artificial Sequence
  Cyclic GFR-binding peptide
DDSSNAPVKLKPLSMLYVDDSSNGGGGGG

SEQ ID NO: 5531 - protein, 27 aa, Artificial Sequence
  Cyclic GFR-binding peptide
DSSNNAPVQLKPLSMLYVDSSNNAAAA

SEQ ID NO: 5532 - protein, 29 aa, Artificial Sequence
  Cyclic GFR-binding peptide
DDMGVAPVRLKPLSMLYVDDMGVAAAAAA

SEQ ID NO: 5533 - protein, 27 aa, Artificial Sequence
  Cyclic GFR-binding peptide
DKGVVAPVALKPLSMLYVDKGVVGGGG

SEQ ID NO: 5534 - protein, 29 aa, Artificial Sequence
  Cyclic GFR-binding peptide
NDKQQAPVDLKPLSMLYVNDKQQGGGGGG

SEQ ID NO: 5535 - protein, 27 aa, Artificial Sequence
  Cyclic GFR-binding peptide
DAANNVPTELKPLSMLYVDAANNAAAA

SEQ ID NO: 5536 - protein, 29 aa, Artificial Sequence
  Cyclic GFR-binding peptide
DSANNVPEKMKPLSMLYVDSANNAAAAAA

SEQ ID NO: 5537 - protein, 27 aa, Artificial Sequence
  Cyclic GFR-binding peptide
DDSSNAPTKLKPLSMLYVDDSSNGGGG

SEQ ID NO: 5538 - protein, 29 aa, Artificial Sequence
  Cyclic GFR-binding peptide
DNGRVAPTQLKPLSMLYVDNGRVGGGGGG

SEQ ID NO: 5539 - protein, 27 aa, Artificial Sequence
  Cyclic GFR-binding peptide
VGRKPVPTKLKPLSMLYVVGRKPAAAA

SEQ ID NO: 5540 - protein, 29 aa, Artificial Sequence
  Cyclic GFR-binding peptide
IGKTPTPTKMKPLSMLYVIGKTPAAAAAA

SEQ ID NO: 5541 - protein, 27 aa, Artificial Sequence
  Cyclic GFR-binding peptide
DENEKVPARLKPLSMLYVVGRTPGGGG

SEQ ID NO: 5542 - protein, 29 aa, Artificial Sequence
  Cyclic GFR-binding peptide
DENKNVPTRLKPLSMLYVRIKPHGGGGGG

SEQ ID NO: 5543 - protein, 27 aa, Artificial Sequence
  Cyclic GFR-binding peptide
DEYDKVPQALKPLSMLYVRIKPHAAAA

SEQ ID NO: 5544 - protein, 29 aa, Artificial Sequence
  Cyclic GFR-binding peptide
DDSSNVSQDLKPLSMLYVRIKPHAAAAAA

SEQ ID NO: 5545 - protein, 27 aa, Artificial Sequence
  Cyclic GFR-binding peptide
DDSSNVPQDLKPLSMLYVRIKPHGGGG

SEQ ID NO: 5546 - protein, 29 aa, Artificial Sequence
  Cyclic GFR-binding peptide
DDSSNVPTEEKPLSMLYVEYVRKGGGGGG

SEQ ID NO: 5547 - protein, 27 aa, Artificial Sequence
  Cyclic GFR-binding peptide
DSSNNVPTGQKPLSMLYVEIVRKAAAA

SEQ ID NO: 5548 - protein, 27 aa, Artificial Sequence
  Cyclic GFR-binding peptide
DDMGVSRVHHKPLSMLYVDENEKGGGG

SEQ ID NO: 5549 - protein, 29 aa, Artificial Sequence
  Cyclic GFR-binding peptide
DKGVVTQVQLKPLSMLYVDENKNGGGGGG

SEQ ID NO: 5550 - protein, 27 aa, Artificial Sequence
  Cyclic GFR-binding peptide
NDKQQVPQELEPLPIVYYDEYDKAAAA

SEQ ID NO: 5551 - protein, 29 aa, Artificial Sequence
  Cyclic GFR-binding peptide
DAANNVPQKMEPLPIVYYDDSSNAAAAAA

SEQ ID NO: 5552 - protein, 27 aa, Artificial Sequence
  Cyclic GFR-binding peptide
DSANNVPQKLEPLPIVYYDDSSNGGGG

SEQ ID NO: 5553 - protein, 29 aa, Artificial Sequence
  Cyclic GFR-binding peptide
DDSSNVPQQLEPLPIVYYDDSSNGGGGGG

SEQ ID NO: 5554 - protein, 27 aa, Artificial Sequence
  Cyclic GFR-binding peptide
DNGRVVPQRLEPLPIVYYDSSNNAAAA

SEQ ID NO: 5555 - protein, 29 aa, Artificial Sequence
  Cyclic GFR-binding peptide
VGRKPVPQKTEPLPIVYYDDMGVAAAAAA

SEQ ID NO: 5556 - protein, 27 aa, Artificial Sequence
  Cyclic GFR-binding peptide
IGKTPVPQDLEPLPIVYYDKGVVGGGG

SEQ ID NO: 5557 - protein, 29 aa, Artificial Sequence
  Cyclic GFR-binding peptide
VGRTPVPTELEPLPIVYYNDKQQGGGGGG

SEQ ID NO: 5558 - protein, 27 aa, Artificial Sequence
  Cyclic GFR-binding peptide
RIKPHVPEKMEPLPIVYYDAANNAAAA

SEQ ID NO: 5559 - protein, 29 aa, Artificial Sequence
  Cyclic GFR-binding peptide
RIKPHAPTKLEPLPIVYYDSANNAAAAAA

SEQ ID NO: 5560 - protein, 27 aa, Artificial Sequence
  Cyclic GFR-binding peptide
RIKPHAPTQLEPLPIVYYDDSSNGGGG

SEQ ID NO: 5561 - protein, 29 aa, Artificial Sequence
  Cyclic GFR-binding peptide
RIKPHVPTKLEPLPIVYYDNGRVGGGGGG

SEQ ID NO: 5562 - protein, 27 aa, Artificial Sequence
  Cyclic GFR-binding peptide
EYVRKTPTKMEPLPIVYYVGRKPAAAA

SEQ ID NO: 5563 - protein, 29 aa, Artificial Sequence
  Cyclic GFR-binding peptide
EIVRKVPARLEPLPIVYYIGKTPAAAAAA

SEQ ID NO: 5564 - protein, 27 aa, Artificial Sequence
  Cyclic GFR-binding peptide
DENEKVPTRLEPLPIVYYVGRTPGGGG

SEQ ID NO: 5565 - protein, 29 aa, Artificial Sequence
  Cyclic GFR-binding peptide
DENKNAPVKTEPLPIVYYRIKPHGGGGGG

SEQ ID NO: 5566 - protein, 27 aa, Artificial Sequence
  Cyclic GFR-binding peptide
DEYDKVSQDLEPLPIVYYRIKPHAAAA

SEQ ID NO: 5567 - protein, 29 aa, Artificial Sequence
  Cyclic GFR-binding peptide
DDSSNVPTEEEPLPIVYYRIKPHAAAAAA

SEQ ID NO: 5568 - protein, 27 aa, Artificial Sequence
  Cyclic GFR-binding peptide
DDSSNVPTGQEPLPIVYYRIKPHGGGG

SEQ ID NO: 5569 - protein, 29 aa, Artificial Sequence
  Cyclic GFR-binding peptide
DDSSNSRVHHEPLPIVYYEYVRKGGGGGG

SEQ ID NO: 5570 - protein, 27 aa, Artificial Sequence
  Cyclic GFR-binding peptide
DSSNNTQVQLEPLPIVYYEIVRKAAAA

SEQ ID NO: 5571 - protein, 27 aa, Artificial Sequence
  Cyclic GFR-binding peptide
DDMGVVSQELEPLTILYYDENEKGGGG

SEQ ID NO: 5572 - protein, 29 aa, Artificial Sequence
  Cyclic GFR-binding peptide
DKGVVVSQKMEPLTILYYDENKNGGGGGG

SEQ ID NO: 5573 - protein, 27 aa, Artificial Sequence
  Cyclic GFR-binding peptide
NDKQQVSQKLEPLTILYYDEYDKAAAA

SEQ ID NO: 5574 - protein, 29 aa, Artificial Sequence
  Cyclic GFR-binding peptide
DAANNVSQQLEPLTILYYDDSSNAAAAAA

SEQ ID NO: 5575 - protein, 27 aa, Artificial Sequence
  Cyclic GFR-binding peptide
DSANNVSQRLEPLTILYYDDSSNGGGG

SEQ ID NO: 5576 - protein, 29 aa, Artificial Sequence
  Cyclic GFR-binding peptide
DDSSNVSQKTEPLTILYYDDSSNGGGGGG

SEQ ID NO: 5577 - protein, 27 aa, Artificial Sequence
  Cyclic GFR-binding peptide
DNGRVVSQALEPLTILYYDSSNNAAAA

SEQ ID NO: 5578 - protein, 29 aa, Artificial Sequence
  Cyclic GFR-binding peptide
VGRKPVSQDLEPLTILYYDDMGVAAAAAA

SEQ ID NO: 5579 - protein, 27 aa, Artificial Sequence
  Cyclic GFR-binding peptide
IGKTPVPTELEPLTILYYDKGVVGGGG

SEQ ID NO: 5580 - protein, 29 aa, Artificial Sequence
  Cyclic GFR-binding peptide
VGRTPVPEKMEPLTILYYNDKQQGGGGGG

SEQ ID NO: 5581 - protein, 27 aa, Artificial Sequence
  Cyclic GFR-binding peptide
RIKPHAPTKLEPLTILYYDAANNAAAA

SEQ ID NO: 5582 - protein, 29 aa, Artificial Sequence
  Cyclic GFR-binding peptide
RIKPHAPTQLEPLTILYYDSANNAAAAAA

SEQ ID NO: 5583 - protein, 27 aa, Artificial Sequence
  Cyclic GFR-binding peptide
RIKPHVPTKLEPLTILYYDDSSNGGGG

SEQ ID NO: 5584 - protein, 29 aa, Artificial Sequence
  Cyclic GFR-binding peptide
RIKPHTPTKMEPLTILYYDNGRVGGGGGG

SEQ ID NO: 5585 - protein, 27 aa, Artificial Sequence
  Cyclic GFR-binding peptide
EYVRKVPARLEPLTILYYVGRKPAAAA

SEQ ID NO: 5586 - protein, 29 aa, Artificial Sequence
  Cyclic GFR-binding peptide
EIVRKVPTRLEPLTILYYIGKTPAAAAAA

SEQ ID NO: 5587 - protein, 27 aa, Artificial Sequence
  Cyclic GFR-binding peptide
DENEKAPVKTEPLTILYYVGRTPGGGG

SEQ ID NO: 5588 - protein, 29 aa, Artificial Sequence
  Cyclic GFR-binding peptide
DENKNVPQALEPLTILYYRIKPHGGGGGG

SEQ ID NO: 5589 - protein, 27 aa, Artificial Sequence
  Cyclic GFR-binding peptide
DEYDKVPTEEEPLTILYYRIKPHAAAA

SEQ ID NO: 5590 - protein, 29 aa, Artificial Sequence
  Cyclic GFR-binding peptide
DDSSNVPTGQEPLTILYYRIKPHAAAAAA

SEQ ID NO: 5591 - protein, 27 aa, Artificial Sequence
  Cyclic GFR-binding peptide
DDSSNSRVHHEPLTILYYRIKPHGGGG

SEQ ID NO: 5592 - protein, 29 aa, Artificial Sequence
  Cyclic GFR-binding peptide
DDSSNTQVQLEPLTILYYEYVRKGGGGGG

SEQ ID NO: 5593 - protein, 27 aa, Artificial Sequence
  Cyclic GFR-binding peptide
DSSNNVPQELEPLTILYYEIVRKAAAA

SEQ ID NO: 5594 - protein, 27 aa, Artificial Sequence
  Cyclic GFR-binding peptide
DDMGVVPQKMEPLTILYYDENEKGGGG

SEQ ID NO: 5595 - protein, 29 aa, Artificial Sequence
  Cyclic GFR-binding peptide
DKGVVVPQKLEPLTILYYDENKNGGGGGG

SEQ ID NO: 5596 - protein, 27 aa, Artificial Sequence
  Cyclic GFR-binding peptide
NDKQQVPQQLEPLTILYYDEYDKAAAA

SEQ ID NO: 5597 - protein, 29 aa, Artificial Sequence
  Cyclic GFR-binding peptide
DAANNVPQRLEPLTILYYDDSSNAAAAAA

SEQ ID NO: 5598 - protein, 27 aa, Artificial Sequence
  Cyclic GFR-binding peptide
DSANNVPQKTEPLTILYYDDSSNGGGG

SEQ ID NO: 5599 - protein, 29 aa, Artificial Sequence
  Cyclic GFR-binding peptide
DDSSNVPQDLEPLTILYYDDSSNGGGGGG

SEQ ID NO: 5600 - protein, 27 aa, Artificial Sequence
  Cyclic GFR-binding peptide
DNGRVVPTGQSNITMQIMDSSNNAAAA

SEQ ID NO: 5601 - protein, 29 aa, Artificial Sequence
  Cyclic GFR-binding peptide
VGRKPVPEKMSNITMQIMDDMGVAAAAAA

SEQ ID NO: 5602 - protein, 27 aa, Artificial Sequence
  Cyclic GFR-binding peptide
IGKTPAPTKLSNITMQIMDKGVVGGGG

SEQ ID NO: 5603 - protein, 29 aa, Artificial Sequence
  Cyclic GFR-binding peptide
VGRTPAPTQLSNITMQIMNDKQQGGGGGG

SEQ ID NO: 5604 - protein, 27 aa, Artificial Sequence
  Cyclic GFR-binding peptide
RIKPHTPTKMSNITMQIMDAANNAAAA

SEQ ID NO: 5605 - protein, 29 aa, Artificial Sequence
  Cyclic GFR-binding peptide
RIKPHVPARLSNITMQIMDSANNAAAAAA

SEQ ID NO: 5606 - protein, 27 aa, Artificial Sequence
  Cyclic GFR-binding peptide
RIKPHAPVKTSNITMQIMDDSSNGGGG

SEQ ID NO: 5607 - protein, 29 aa, Artificial Sequence
  Cyclic GFR-binding peptide
RIKPHVPQALSNITMQIMDNGRVGGGGGG

SEQ ID NO: 5608 - protein, 27 aa, Artificial Sequence
  Cyclic GFR-binding peptide
EYVRKVSQDLSNITMQIMVGRKPAAAA

SEQ ID NO: 5609 - protein, 29 aa, Artificial Sequence
  Cyclic GFR-binding peptide
EIVRKVPQDLSNITMQIMIGKTPAAAAAA

SEQ ID NO: 5610 - protein, 27 aa, Artificial Sequence
  Cyclic GFR-binding peptide
DENEKSRVHHSNITMQIMVGRTPGGGG

SEQ ID NO: 5611 - protein, 29 aa, Artificial Sequence
  Cyclic GFR-binding peptide
DENKNTQVQLSNITMQIMRIKPHGGGGGG

SEQ ID NO: 5612 - protein, 27 aa, Artificial Sequence
  Cyclic GFR-binding peptide
DEYDKSRVQLRSVKVAKVRIKPHAAAA

SEQ ID NO: 5613 - protein, 29 aa, Artificial Sequence
  Cyclic GFR-binding peptide
DDSSNVPTELRSVKVAKVRIKPHAAAAAA

SEQ ID NO: 5614 - protein, 27 aa, Artificial Sequence
  Cyclic GFR-binding peptide
DDSSNVPEKMRSVKVAKVRIKPHGGGG

SEQ ID NO: 5615 - protein, 29 aa, Artificial Sequence
  Cyclic GFR-binding peptide
DDSSNAPTKLRSVKVAKVEYVRKGGGGGG

SEQ ID NO: 5616 - protein, 27 aa, Artificial Sequence
  Cyclic GFR-binding peptide
DSSNNAPTQLRSVKVAKVEIVRKAAAA

SEQ ID NO: 5617 - protein, 27 aa, Artificial Sequence
  Cyclic GFR-binding peptide
DDMGVVPTKLRSVKVAKVDENEKGGGG

SEQ ID NO: 5618 - protein, 29 aa, Artificial Sequence
  Cyclic GFR-binding peptide
DKGVVTPTKMRSVKVAKVDENKNGGGGGG

SEQ ID NO: 5619 - protein, 27 aa, Artificial Sequence
  Cyclic GFR-binding peptide
NDKQQVPARLRSVKVAKVDEYDKAAAA

SEQ ID NO: 5620 - protein, 29 aa, Artificial Sequence
  Cyclic GFR-binding peptide
DAANNVPTRLRSVKVAKVDDSSNAAAAAA

SEQ ID NO: 5621 - protein, 27 aa, Artificial Sequence
  Cyclic GFR-binding peptide
DSANNAPVKTRSVKVAKVDDSSNGGGG

SEQ ID NO: 5622 - protein, 29 aa, Artificial Sequence
  Cyclic GFR-binding peptide
DDSSNVPQALRSVKVAKVDDSSNGGGGGG

SEQ ID NO: 5623 - protein, 27 aa, Artificial Sequence
  Cyclic GFR-binding peptide
DNGRVVSQDLRSVKVAKVDSSNNAAAA

SEQ ID NO: 5624 - protein, 29 aa, Artificial Sequence
  Cyclic GFR-binding peptide
VGRKPVPQDLRSVKVAKVDDMGVAAAAAA

SEQ ID NO: 5625 - protein, 27 aa, Artificial Sequence
  Cyclic GFR-binding peptide
IGKTPVPTEERSVKVAKVDKGVVGGGG

SEQ ID NO: 5626 - protein, 29 aa, Artificial Sequence
  Cyclic GFR-binding peptide
VGRTPVPTGQRSVKVAKVNDKQQGGGGGG

SEQ ID NO: 5627 - protein, 27 aa, Artificial Sequence
  Cyclic GFR-binding peptide
RIKPHTQVQLRSVKVAKVDAANNAAAA

SEQ ID NO: 5628 - protein, 29 aa, Artificial Sequence
  Cyclic GFR-binding peptide
RIKPHTQVHHRPVQVRKIDSANNAAAAAA

SEQ ID NO: 5629 - protein, 27 aa, Artificial Sequence
  Cyclic GFR-binding peptide
RIKPHVPTELRPVQVRKIDDSSNGGGG

SEQ ID NO: 5630 - protein, 29 aa, Artificial Sequence
  Cyclic GFR-binding peptide
RIKPHVPEKMRPVQVRKIDNGRVGGGGGG

SEQ ID NO: 5631 - protein, 27 aa, Artificial Sequence
  Cyclic GFR-binding peptide
EYVRKAPTKLRPVQVRKIVGRKPAAAA

SEQ ID NO: 5632 - protein, 29 aa, Artificial Sequence
  Cyclic GFR-binding peptide
EIVRKAPTQLRPVQVRKIIGKTPAAAAAA

SEQ ID NO: 5633 - protein, 27 aa, Artificial Sequence
  Cyclic GFR-binding peptide
DENEKVPTKLRPVQVRKIVGRTPGGGG

SEQ ID NO: 5634 - protein, 29 aa, Artificial Sequence
  Cyclic GFR-binding peptide
DENKNTPTKMRPVQVRKIRIKPHGGGGGG

SEQ ID NO: 5635 - protein, 27 aa, Artificial Sequence
  Cyclic GFR-binding peptide
DEYDKVPARLRPVQVRKIRIKPHAAAA

SEQ ID NO: 5636 - protein, 29 aa, Artificial Sequence
  Cyclic GFR-binding peptide
DDSSNVPTRLRPVQVRKIRIKPHAAAAAA

SEQ ID NO: 5637 - protein, 27 aa, Artificial Sequence
  Cyclic GFR-binding peptide
DDSSNAPVKTRPVQVRKIRIKPHGGGG

SEQ ID NO: 5638 - protein, 29 aa, Artificial Sequence
  Cyclic GFR-binding peptide
DDSSNVPQALRPVQVRKIEYVRKGGGGGG

SEQ ID NO: 5639 - protein, 27 aa, Artificial Sequence
  Cyclic GFR-binding peptide
DSSNNVSQDLRPVQVRKIEIVRKAAAA

SEQ ID NO: 5640 - protein, 27 aa, Artificial Sequence
  Cyclic GFR-binding peptide
DDMGVVPQDLRPVQVRKIDENEKGGGG

SEQ ID NO: 5641 - protein, 29 aa, Artificial Sequence
  Cyclic GFR-binding peptide
DKGVVVPTEERPVQVRKIDENKNGGGGGG

SEQ ID NO: 5642 - protein, 27 aa, Artificial Sequence
  Cyclic GFR-binding peptide
NDKQQVPTGQRPVQVRKIDEYDKAAAA

SEQ ID NO: 5643 - protein, 29 aa, Artificial Sequence
  Cyclic GFR-binding peptide
DAANNSRVHHRPVQVRKIDDSSNAAAAAA

SEQ ID NO: 5644 - protein, 27 aa, Artificial Sequence
  Cyclic GFR-binding peptide
GGGGKENEDLYLMSIASMKTPVGWFWW

SEQ ID NO: 5645 - protein, 29 aa, Artificial Sequence
  Cyclic GFR-binding peptide
GGGGGGNKNEDLYLMSIASLKTPVPGPTG

SEQ ID NO: 5646 - protein, 28 aa, Artificial Sequence
  Cyclic GFR-binding peptide
AAAAKDYEDLYLMSIASLQTPVGGWFWW

SEQ ID NO: 5647 - protein, 30 aa, Artificial Sequence
  Cyclic GFR-binding peptide
AAAAAANSSDDLYLMSIASLRTPVGPGPTG

SEQ ID NO: 5648 - protein, 29 aa, Artificial Sequence
  Cyclic GFR-binding peptide
GGGGNSSDDLYLMSIASTKTPVGGGWFWW

SEQ ID NO: 5649 - protein, 31 aa, Artificial Sequence
  Cyclic GFR-binding peptide
GGGGGGNSSDDLYLMSIASLATPVGGPGPTG

SEQ ID NO: 5650 - protein, 30 aa, Artificial Sequence
  Cyclic GFR-binding peptide
AAAANNSSDLYLMSIASLDTPVGGGGWFWW

SEQ ID NO: 5651 - protein, 32 aa, Artificial Sequence
  Cyclic GFR-binding peptide
AAAAAAVGMDDLYLMSIASMKEPVGGGPGPTG

SEQ ID NO: 5652 - protein, 27 aa, Artificial Sequence
  Cyclic GFR-binding peptide
GGGGVVGKDLYLMSIASLKTPAGWFWW

SEQ ID NO: 5653 - protein, 29 aa, Artificial Sequence
  Cyclic GFR-binding peptide
GGGGGGQQKDNLYLMSIASLQTPAPGPTG

SEQ ID NO: 5654 - protein, 28 aa, Artificial Sequence
  Cyclic GFR-binding peptide
AAAANNAADLYLMSIASMKTPTGGWFWW

SEQ ID NO: 5655 - protein, 30 aa, Artificial Sequence
  Cyclic GFR-binding peptide
AAAAAANNASDLYLMSIASLRAPVGPGPTG

SEQ ID NO: 5656 - protein, 29 aa, Artificial Sequence
  Cyclic GFR-binding peptide
GGGGNSSDDLYLMSIASTKVPAGGGWFWW

SEQ ID NO: 5657 - protein, 31 aa, Artificial Sequence
  Cyclic GFR-binding peptide
GGGGGGVRGNDLYLMSIASLAQPVGGPGPTG

SEQ ID NO: 5658 - protein, 30 aa, Artificial Sequence
  Cyclic GFR-binding peptide
AAAAPKRGVLYLMSIASLDQSVGGGGWFWW

SEQ ID NO: 5659 - protein, 32 aa, Artificial Sequence
  Cyclic GFR-binding peptide
AAAAAAPTKGILYLMSIASLDQPVGGGPGPTG

SEQ ID NO: 5660 - protein, 27 aa, Artificial Sequence
  Cyclic GFR-binding peptide
GGGGPTRGVLYLMSIASHHVRSGWFWW

SEQ ID NO: 5661 - protein, 29 aa, Artificial Sequence
  Cyclic GFR-binding peptide
GGGGGGHPKIRLYLMSIASLQVQTPGPTG

SEQ ID NO: 5662 - protein, 28 aa, Artificial Sequence
  Cyclic GFR-binding peptide
AAAAHPKIRFFLISLSSLEEPVGGWFWW

SEQ ID NO: 5663 - protein, 30 aa, Artificial Sequence
  Cyclic GFR-binding peptide
AAAAAAHPKIRFFLISLSSLKEPVGPGPTG

SEQ ID NO: 5664 - protein, 29 aa, Artificial Sequence
  Cyclic GFR-binding peptide
GGGGHPKIRFFLISLSSLQEPVGGGWFWW

SEQ ID NO: 5665 - protein, 31 aa, Artificial Sequence
  Cyclic GFR-binding peptide
GGGGGGKRVYEFFLISLSSMKEPVGGPGPTG

SEQ ID NO: 5666 - protein, 30 aa, Artificial Sequence
  Cyclic GFR-binding peptide
AAAAKRVIEFFLISLSSLREPVGGGGWFWW

SEQ ID NO: 5667 - protein, 30 aa, Artificial Sequence
  Cyclic GFR-binding peptide
GGGGKENEDFFLISLSSTKEPVGGGPGPTG

SEQ ID NO: 5668 - protein, 29 aa, Artificial Sequence
  Cyclic GFR-binding peptide
GGGGGGNKNEDFFLISLSSLAEPVGWFWW

SEQ ID NO: 5669 - protein, 27 aa, Artificial Sequence
  Cyclic GFR-binding peptide
AAAAKDYEDFFLISLSSLDEPVPGPTG

SEQ ID NO: 5670 - protein, 30 aa, Artificial Sequence
  Cyclic GFR-binding peptide
AAAAAANSSDDFFLISLSSLETPVGGWFWW

SEQ ID NO: 5671 - protein, 28 aa, Artificial Sequence
  Cyclic GFR-binding peptide
GGGGNSSDDFFLISLSSLKTPAGPGPTG

SEQ ID NO: 5672 - protein, 31 aa, Artificial Sequence
  Cyclic GFR-binding peptide
GGGGGGNSSDDFFLISLSSLQTPAGGGWFWW

SEQ ID NO: 5673 - protein, 29 aa, Artificial Sequence
  Cyclic GFR-binding peptide
AAAANNSSDFFLISLSSLKTPVGGPGPTG

SEQ ID NO: 5674 - protein, 32 aa, Artificial Sequence
  Cyclic GFR-binding peptide
AAAAAAVGMDDFFLISLSSMKTPTGGGGWFWW

SEQ ID NO: 5675 - protein, 30 aa, Artificial Sequence
  Cyclic GFR-binding peptide
GGGGVVGKDFFLISLSSLRAPVGGGPGPTG

SEQ ID NO: 5676 - protein, 29 aa, Artificial Sequence
  Cyclic GFR-binding peptide
GGGGGGQQKDNFFLISLSSLRTPVGWFWW

SEQ ID NO: 5677 - protein, 27 aa, Artificial Sequence
  Cyclic GFR-binding peptide
AAAANNAADFFLISLSSTKVPAPGPTG

SEQ ID NO: 5678 - protein, 30 aa, Artificial Sequence
  Cyclic GFR-binding peptide
AAAAAANNASDFFLISLSSLAQPVGGWFWW

SEQ ID NO: 5679 - protein, 28 aa, Artificial Sequence
  Cyclic GFR-binding peptide
GGGGNSSDDFFLISLSSLDQSVGPGPTG

SEQ ID NO: 5680 - protein, 31 aa, Artificial Sequence
  Cyclic GFR-binding peptide
GGGGGGVRGNDFFLISLSSLDQPVGGGWFWW

SEQ ID NO: 5681 - protein, 29 aa, Artificial Sequence
  Cyclic GFR-binding peptide
AAAAPKRGVFFLISLSSEETPVGGPGPTG

SEQ ID NO: 5682 - protein, 32 aa, Artificial Sequence
  Cyclic GFR-binding peptide
AAAAAAPTKGIFFLISLSSQGTPVGGGGWFWW

SEQ ID NO: 5683 - protein, 30 aa, Artificial Sequence
  Cyclic GFR-binding peptide
GGGGPTRGVFFLISLSSHHVRSGGGPGPTG

SEQ ID NO: 5684 - protein, 29 aa, Artificial Sequence
  Cyclic GFR-binding peptide
GGGGGGHPKIRFFLISLSSLQVQTGWFWW

SEQ ID NO: 5685 - protein, 27 aa, Artificial Sequence
  Cyclic GFR-binding peptide
AAAAHPKIRFYLVSIANLETPAPGPTG

SEQ ID NO: 5686 - protein, 30 aa, Artificial Sequence
  Cyclic GFR-binding peptide
AAAAAAHPKIRFYLVSIANMKTPAGGWFWW

SEQ ID NO: 5687 - protein, 28 aa, Artificial Sequence
  Cyclic GFR-binding peptide
GGGGHPKIRFYLVSIANLKTPAGPGPTG

SEQ ID NO: 5688 - protein, 31 aa, Artificial Sequence
  Cyclic GFR-binding peptide
GGGGGGKRVYEFYLVSIANLRTPAGGGWFWW

SEQ ID NO: 5689 - protein, 29 aa, Artificial Sequence
  Cyclic GFR-binding peptide
AAAAKRVIEFYLVSIANTKTPAGGPGPTG

SEQ ID NO: 5690 - protein, 30 aa, Artificial Sequence
  Cyclic GFR-binding peptide
GGGGKENEDFYLVSIANLATPAGGGGWFWW

SEQ ID NO: 5691 - protein, 32 aa, Artificial Sequence
  Cyclic GFR-binding peptide
GGGGGGNKNEDFYLVSIANLDTPAGGGPGPTG

SEQ ID NO: 5692 - protein, 27 aa, Artificial Sequence
  Cyclic GFR-binding peptide
AAAAKDYEDFYLVSIANLETPVGWFWW

SEQ ID NO: 5693 - protein, 29 aa, Artificial Sequence
  Cyclic GFR-binding peptide
AAAAAANSSDDFYLVSIANMKEPVPGPTG

SEQ ID NO: 5694 - protein, 28 aa, Artificial Sequence
  Cyclic GFR-binding peptide
GGGGNSSDDFYLVSIANLKTPVGGWFWW

SEQ ID NO: 5695 - protein, 30 aa, Artificial Sequence
  Cyclic GFR-binding peptide
GGGGGGNSSDDFYLVSIANMKTPTGPGPTG

SEQ ID NO: 5696 - protein, 29 aa, Artificial Sequence
  Cyclic GFR-binding peptide
AAAANNSSDFYLVSIANLRAPVGGGWFWW

SEQ ID NO: 5697 - protein, 31 aa, Artificial Sequence
  Cyclic GFR-binding peptide
AAAAAAVGMDDFYLVSIANLRTPVGGPGPTG

SEQ ID NO: 5698 - protein, 30 aa, Artificial Sequence
  Cyclic GFR-binding peptide
GGGGVVGKDFYLVSIANTKVPAGGGGWFWW

SEQ ID NO: 5699 - protein, 32 aa, Artificial Sequence
  Cyclic GFR-binding peptide
GGGGGGQQKDNFYLVSIANLAQPVGGGPGPTG

SEQ ID NO: 5700 - protein, 27 aa, Artificial Sequence
  Cyclic GFR-binding peptide
AAAANNAADFYLVSIANLDQSVGWFWW

SEQ ID NO: 5701 - protein, 29 aa, Artificial Sequence
  Cyclic GFR-binding peptide
AAAAAANNASDFYLVSIANLDQPVPGPTG

SEQ ID NO: 5702 - protein, 28 aa, Artificial Sequence
  Cyclic GFR-binding peptide
GGGGNSSDDFYLVSIANEETPVGGWFWW

SEQ ID NO: 5703 - protein, 30 aa, Artificial Sequence
  Cyclic GFR-binding peptide
GGGGGGVRGNDFYLVSIANQGTPVGPGPTG

SEQ ID NO: 5704 - protein, 29 aa, Artificial Sequence
  Cyclic GFR-binding peptide
AAAAPKRGVFYLVSIANHHVRSGGGWFWW

SEQ ID NO: 5705 - protein, 31 aa, Artificial Sequence
  Cyclic GFR-binding peptide
AAAAAAPTKGIFYLVSIANLQVQTGGPGPTG

SEQ ID NO: 5706 - protein, 30 aa, Artificial Sequence
  Cyclic GFR-binding peptide
GGGGPTRGVYYLVSTASLETPAGGGGWFWW

SEQ ID NO: 5707 - protein, 32 aa, Artificial Sequence
  Cyclic GFR-binding peptide
GGGGGGHPKIRYYLVSTASMKTPAGGGPGPTG

SEQ ID NO: 5708 - protein, 27 aa, Artificial Sequence
  Cyclic GFR-binding peptide
AAAAHPKIRYYLVSTASLKTPAGWFWW

SEQ ID NO: 5709 - protein, 29 aa, Artificial Sequence
  Cyclic GFR-binding peptide
AAAAAAHPKIRYYLVSTASLQTPAPGPTG

SEQ ID NO: 5710 - protein, 28 aa, Artificial Sequence
  Cyclic GFR-binding peptide
GGGGHPKIRYYLVSTASLRTPAGGWFWW

SEQ ID NO: 5711 - protein, 30 aa, Artificial Sequence
  Cyclic GFR-binding peptide
GGGGGGKRVYEYYLVSTASTKTPAGPGPTG

SEQ ID NO: 5712 - protein, 29 aa, Artificial Sequence
  Cyclic GFR-binding peptide
AAAAKRVIEYYLVSTASLATPAGGGWFWW

SEQ ID NO: 5713 - protein, 29 aa, Artificial Sequence
  Cyclic GFR-binding peptide
GGGGKENEDYYLVSTASLDTPAGGPGPTG

SEQ ID NO: 5714 - protein, 32 aa, Artificial Sequence
  Cyclic GFR-binding peptide
GGGGGGNKNEDYYLVSTASLETPVGGGGWFWW

SEQ ID NO: 5715 - protein, 30 aa, Artificial Sequence
  Cyclic GFR-binding peptide
AAAAKDYEDYYLVSTASMKEPVGGGPGPTG

SEQ ID NO: 5716 - protein, 29 aa, Artificial Sequence
  Cyclic GFR-binding peptide
AAAAAANSSDDYYLVSTASLKTPVGWFWW

SEQ ID NO: 5717 - protein, 27 aa, Artificial Sequence
  Cyclic GFR-binding peptide
GGGGNSSDDYYLVSTASMKTPTPGPTG

SEQ ID NO: 5718 - protein, 30 aa, Artificial Sequence
  Cyclic GFR-binding peptide
GGGGGGNSSDDYYLVSTASLRAPVGGWFWW

SEQ ID NO: 5719 - protein, 28 aa, Artificial Sequence
  Cyclic GFR-binding peptide
AAAANNSSDYYLVSTASLRTPVGPGPTG

SEQ ID NO: 5720 - protein, 31 aa, Artificial Sequence
  Cyclic GFR-binding peptide
AAAAAAVGMDDYYLVSTASTKVPAGGGWFWW

SEQ ID NO: 5721 - protein, 29 aa, Artificial Sequence
  Cyclic GFR-binding peptide
GGGGVVGKDYYLVSTASLAQPVGGPGPTG

SEQ ID NO: 5722 - protein, 32 aa, Artificial Sequence
  Cyclic GFR-binding peptide
GGGGGGQQKDNYYLVSTASLDQSVGGGGWFWW

SEQ ID NO: 5723 - protein, 30 aa, Artificial Sequence
  Cyclic GFR-binding peptide
AAAANNAADYYLVSTASLDQPVGGGPGPTG

SEQ ID NO: 5724 - protein, 29 aa, Artificial Sequence
  Cyclic GFR-binding peptide
AAAAAANNASDYYLVSTASEETPVGWFWW

SEQ ID NO: 5725 - protein, 27 aa, Artificial Sequence
  Cyclic GFR-binding peptide
GGGGNSSDDYYLVSTASQGTPVPGPTG

SEQ ID NO: 5726 - protein, 30 aa, Artificial Sequence
  Cyclic GFR-binding peptide
GGGGGGVRGNDYYLVSTASHHVRSGGWFWW

SEQ ID NO: 5727 - protein, 28 aa, Artificial Sequence
  Cyclic GFR-binding peptide
AAAAPKRGVYYLVSTASLQVQTGPGPTG

SEQ ID NO: 5728 - protein, 31 aa, Artificial Sequence
  Cyclic GFR-binding peptide
AAAAAAPTKGIKYLVSIPSLETPVGGGWFWW

SEQ ID NO: 5729 - protein, 29 aa, Artificial Sequence
  Cyclic GFR-binding peptide
GGGGPTRGVKYLVSIPSMKTPVGGPGPTG

SEQ ID NO: 5730 - protein, 32 aa, Artificial Sequence
  Cyclic GFR-binding peptide
GGGGGGHPKIRKYLVSIPSLKTPVGGGGWFWW

SEQ ID NO: 5731 - protein, 30 aa, Artificial Sequence
  Cyclic GFR-binding peptide
AAAAHPKIRKYLVSIPSLQTPVGGGPGPTG

SEQ ID NO: 5732 - protein, 29 aa, Artificial Sequence
  Cyclic GFR-binding peptide
AAAAAAHPKIRKYLVSIPSLRTPVGWFWW

SEQ ID NO: 5733 - protein, 27 aa, Artificial Sequence
  Cyclic GFR-binding peptide
GGGGHPKIRKYLVSIPSTKTPVPGPTG

SEQ ID NO: 5734 - protein, 30 aa, Artificial Sequence
  Cyclic GFR-binding peptide
GGGGGGKRVYEKYLVSIPSLATPVGGWFWW

SEQ ID NO: 5735 - protein, 28 aa, Artificial Sequence
  Cyclic GFR-binding peptide
AAAAKRVIEKYLVSIPSLDTPVGPGPTG

SEQ ID NO: 5736 - protein, 29 aa, Artificial Sequence
  Cyclic GFR-binding peptide
GGGGKENEDKYLVSIPSMKEPVGGGWFWW

SEQ ID NO: 5737 - protein, 31 aa, Artificial Sequence
  Cyclic GFR-binding peptide
GGGGGGNKNEDKYLVSIPSLKTPAGGPGPTG

SEQ ID NO: 5738 - protein, 30 aa, Artificial Sequence
  Cyclic GFR-binding peptide
AAAAKDYEDKYLVSIPSLQTPAGGGGWFWW

SEQ ID NO: 5739 - protein, 32 aa, Artificial Sequence
  Cyclic GFR-binding peptide
AAAAAANSSDDKYLVSIPSMKTPTGGGPGPTG

SEQ ID NO: 5740 - protein, 27 aa, Artificial Sequence
  Cyclic GFR-binding peptide
GGGGNSSDDKYLVSIPSLRAPVGWFWW

SEQ ID NO: 5741 - protein, 29 aa, Artificial Sequence
  Cyclic GFR-binding peptide
GGGGGGNSSDDKYLVSIPSTKVPAPGPTG

SEQ ID NO: 5742 - protein, 28 aa, Artificial Sequence
  Cyclic GFR-binding peptide
AAAANNSSDKYLVSIPSLAQPVGGWFWW

SEQ ID NO: 5743 - protein, 30 aa, Artificial Sequence
  Cyclic GFR-binding peptide
AAAAAAVGMDDKYLVSIPSLDQSVGPGPTG

SEQ ID NO: 5744 - protein, 29 aa, Artificial Sequence
  Cyclic GFR-binding peptide
GGGGVVGKDKYLVSIPSLDQPVGGGWFWW

SEQ ID NO: 5745 - protein, 31 aa, Artificial Sequence
  Cyclic GFR-binding peptide
GGGGGGQQKDNKYLVSIPSHHVRSGGPGPTG

SEQ ID NO: 5746 - protein, 30 aa, Artificial Sequence
  Cyclic GFR-binding peptide
AAAANNAADKYLVSIPSLQVQTGGGGWFWW

SEQ ID NO: 5747 - protein, 32 aa, Artificial Sequence
  Cyclic GFR-binding peptide
AAAAAANNASDLYLISIPELETPVGGGPGPTG

SEQ ID NO: 5748 - protein, 27 aa, Artificial Sequence
  Cyclic GFR-binding peptide
GGGGNSSDDLYLISIPEMKTPVGWFWW

SEQ ID NO: 5749 - protein, 29 aa, Artificial Sequence
  Cyclic GFR-binding peptide
GGGGGGVRGNDLYLISIPELKTPVPGPTG

SEQ ID NO: 5750 - protein, 28 aa, Artificial Sequence
  Cyclic GFR-binding peptide
AAAAPKRGVLYLISIPELQTPVGGWFWW

SEQ ID NO: 5751 - protein, 30 aa, Artificial Sequence
  Cyclic GFR-binding peptide
AAAAAAPTKGILYLISIPELRTPVGPGPTG

SEQ ID NO: 5752 - protein, 29 aa, Artificial Sequence
  Cyclic GFR-binding peptide
GGGGPTRGVLYLISIPETKTPVGGGWFWW

SEQ ID NO: 5753 - protein, 31 aa, Artificial Sequence
  Cyclic GFR-binding peptide
GGGGGGHPKIRLYLISIPELATPVGGPGPTG

SEQ ID NO: 5754 - protein, 30 aa, Artificial Sequence
  Cyclic GFR-binding peptide
AAAAHPKIRLYLISIPELDTPVGGGGWFWW

SEQ ID NO: 5755 - protein, 32 aa, Artificial Sequence
  Cyclic GFR-binding peptide
AAAAAAHPKIRLYLISIPEMKEPVGGGPGPTG

SEQ ID NO: 5756 - protein, 27 aa, Artificial Sequence
  Cyclic GFR-binding peptide
GGGGHPKIRLYLISIPELKTPAGWFWW

SEQ ID NO: 5757 - protein, 29 aa, Artificial Sequence
  Cyclic GFR-binding peptide
GGGGGGKRVYELYLISIPELQTPAPGPTG

SEQ ID NO: 5758 - protein, 28 aa, Artificial Sequence
  Cyclic GFR-binding peptide
AAAAKRVIELYLISIPEMKTPTGGWFWW

SEQ ID NO: 5759 - protein, 28 aa, Artificial Sequence
  Cyclic GFR-binding peptide
GGGGKENEDLYLISIPELRAPVGPGPTG

SEQ ID NO: 5760 - protein, 31 aa, Artificial Sequence
  Cyclic GFR-binding peptide
GGGGGGNKNEDLYLISIPETKVPAGGGWFWW

SEQ ID NO: 5761 - protein, 29 aa, Artificial Sequence
  Cyclic GFR-binding peptide
AAAAKDYEDLYLISIPELAQPVGGPGPTG

SEQ ID NO: 5762 - protein, 32 aa, Artificial Sequence
  Cyclic GFR-binding peptide
AAAAAANSSDDLYLISIPELDQSVGGGGWFWW

SEQ ID NO: 5763 - protein, 30 aa, Artificial Sequence
  Cyclic GFR-binding peptide
GGGGNSSDDLYLISIPELDQPVGGGPGPTG

SEQ ID NO: 5764 - protein, 29 aa, Artificial Sequence
  Cyclic GFR-binding peptide
GGGGGGNSSDDLYLISIPEHHVRSGWFWW

SEQ ID NO: 5765 - protein, 27 aa, Artificial Sequence
  Cyclic GFR-binding peptide
AAAANNSSDLYLISIPELQVQTPGPTG

SEQ ID NO: 5766 - protein, 30 aa, Artificial Sequence
  Cyclic GFR-binding peptide
AAAAAAVGMDDFYLMNIPSLETPTGGWFWW

SEQ ID NO: 5767 - protein, 28 aa, Artificial Sequence
  Cyclic GFR-binding peptide
GGGGVVGKDFYLMNIPSMKTPTGPGPTG

SEQ ID NO: 5768 - protein, 31 aa, Artificial Sequence
  Cyclic GFR-binding peptide
GGGGGGQQKDNFYLMNIPSLKTPTGGGWFWW

SEQ ID NO: 5769 - protein, 29 aa, Artificial Sequence
  Cyclic GFR-binding peptide
AAAANNAADFYLMNIPSLQTPTGGPGPTG

SEQ ID NO: 5770 - protein, 32 aa, Artificial Sequence
  Cyclic GFR-binding peptide
AAAAAANNASDFYLMNIPSLRTPTGGGGWFWW

SEQ ID NO: 5771 - protein, 30 aa, Artificial Sequence
  Cyclic GFR-binding peptide
GGGGNSSDDFYLMNIPSTKTPTGGGPGPTG

SEQ ID NO: 5772 - protein, 29 aa, Artificial Sequence
  Cyclic GFR-binding peptide
GGGGGGVRGNDFYLMNIPSLATPTGWFWW

SEQ ID NO: 5773 - protein, 27 aa, Artificial Sequence
  Cyclic GFR-binding peptide
AAAAPKRGVFYLMNIPSLDTPTPGPTG

SEQ ID NO: 5774 - protein, 30 aa, Artificial Sequence
  Cyclic GFR-binding peptide
AAAAAAPTKGIFYLMNIPSLETPVGGWFWW

SEQ ID NO: 5775 - protein, 28 aa, Artificial Sequence
  Cyclic GFR-binding peptide
GGGGPTRGVFYLMNIPSMKEPVGPGPTG

SEQ ID NO: 5776 - protein, 31 aa, Artificial Sequence
  Cyclic GFR-binding peptide
GGGGGGHPKIRFYLMNIPSLKTPAGGGWFWW

SEQ ID NO: 5777 - protein, 29 aa, Artificial Sequence
  Cyclic GFR-binding peptide
AAAAHPKIRFYLMNIPSLQTPAGGPGPTG

SEQ ID NO: 5778 - protein, 32 aa, Artificial Sequence
  Cyclic GFR-binding peptide
AAAAAAHPKIRFYLMNIPSLKTPVGGGGWFWW

SEQ ID NO: 5779 - protein, 30 aa, Artificial Sequence
  Cyclic GFR-binding peptide
GGGGHPKIRFYLMNIPSLRAPVGGGPGPTG

SEQ ID NO: 5780 - protein, 29 aa, Artificial Sequence
  Cyclic GFR-binding peptide
GGGGGGKRVYEFYLMNIPSLRTPVGWFWW

SEQ ID NO: 5781 - protein, 27 aa, Artificial Sequence
  Cyclic GFR-binding peptide
AAAAKRVIEFYLMNIPSTKVPAPGPTG

SEQ ID NO: 5782 - protein, 28 aa, Artificial Sequence
  Cyclic GFR-binding peptide
GGGGKENEDFYLMNIPSLAQPVGGWFWW

SEQ ID NO: 5783 - protein, 30 aa, Artificial Sequence
  Cyclic GFR-binding peptide
GGGGGGNKNEDFYLMNIPSLDQSVGPGPTG

SEQ ID NO: 5784 - protein, 29 aa, Artificial Sequence
  Cyclic GFR-binding peptide
AAAAKDYEDFYLMNIPSLDQPVGGGWFWW

SEQ ID NO: 5785 - protein, 31 aa, Artificial Sequence
  Cyclic GFR-binding peptide
AAAAAANSSDDFYLMNIPSEETPVGGPGPTG

SEQ ID NO: 5786 - protein, 30 aa, Artificial Sequence
  Cyclic GFR-binding peptide
GGGGNSSDDFYLMNIPSQGTPVGGGGWFWW

SEQ ID NO: 5787 - protein, 32 aa, Artificial Sequence
  Cyclic GFR-binding peptide
GGGGGGNSSDDFYLMNIPSHHVRSGGGPGPTG

SEQ ID NO: 5788 - protein, 27 aa, Artificial Sequence
  Cyclic GFR-binding peptide
AAAANNSSDFYLMNIPSLQVQTGWFWW

SEQ ID NO: 5789 - protein, 29 aa, Artificial Sequence
  Cyclic GFR-binding peptide
AAAAAAVGMDDIYLISIPSLEAPVPGPTG

SEQ ID NO: 5790 - protein, 28 aa, Artificial Sequence
  Cyclic GFR-binding peptide
GGGGVVGKDIYLISIPSMKAPVGGWFWW

SEQ ID NO: 5791 - protein, 30 aa, Artificial Sequence
  Cyclic GFR-binding peptide
GGGGGGQQKDNIYLISIPSLKAPVGPGPTG

SEQ ID NO: 5792 - protein, 29 aa, Artificial Sequence
  Cyclic GFR-binding peptide
AAAANNAADIYLISIPSLQAPVGGGWFWW

SEQ ID NO: 5793 - protein, 31 aa, Artificial Sequence
  Cyclic GFR-binding peptide
AAAAAANNASDIYLISIPSLRAPVGGPGPTG

SEQ ID NO: 5794 - protein, 30 aa, Artificial Sequence
  Cyclic GFR-binding peptide
GGGGNSSDDIYLISIPSTKAPVGGGGWFWW

SEQ ID NO: 5795 - protein, 32 aa, Artificial Sequence
  Cyclic GFR-binding peptide
GGGGGGVRGNDIYLISIPSLAAPVGGGPGPTG

SEQ ID NO: 5796 - protein, 27 aa, Artificial Sequence
  Cyclic GFR-binding peptide
AAAAPKRGVIYLISIPSLDAPVGWFWW

SEQ ID NO: 5797 - protein, 29 aa, Artificial Sequence
  Cyclic GFR-binding peptide
AAAAAAPTKGIIYLISIPSLETPVPGPTG

SEQ ID NO: 5798 - protein, 28 aa, Artificial Sequence
  Cyclic GFR-binding peptide
GGGGPTRGVIYLISIPSMKEPVGGWFWW

SEQ ID NO: 5799 - protein, 30 aa, Artificial Sequence
  Cyclic GFR-binding peptide
GGGGGGHPKIRIYLISIPSLKTPAGPGPTG

SEQ ID NO: 5800 - protein, 29 aa, Artificial Sequence
  Cyclic GFR-binding peptide
AAAAHPKIRIYLISIPSLQTPAGGGWFWW

SEQ ID NO: 5801 - protein, 31 aa, Artificial Sequence
  Cyclic GFR-binding peptide
AAAAAAHPKIRIYLISIPSLKTPVGGPGPTG

SEQ ID NO: 5802 - protein, 30 aa, Artificial Sequence
  Cyclic GFR-binding peptide
GGGGHPKIRIYLISIPSMKTPTGGGGWFWW

SEQ ID NO: 5803 - protein, 32 aa, Artificial Sequence
  Cyclic GFR-binding peptide
GGGGGGKRVYEIYLISIPSLRTPVGGGPGPTG

SEQ ID NO: 5804 - protein, 27 aa, Artificial Sequence
  Cyclic GFR-binding peptide
AAAAKRVIEIYLISIPSTKVPAGWFWW

SEQ ID NO: 5805 - protein, 27 aa, Artificial Sequence
  Cyclic GFR-binding peptide
GGGGKENEDIYLISIPSLAQPVPGPTG

SEQ ID NO: 5806 - protein, 30 aa, Artificial Sequence
  Cyclic GFR-binding peptide
GGGGGGNKNEDIYLISIPSLDQSVGGWFWW

SEQ ID NO: 5807 - protein, 28 aa, Artificial Sequence
  Cyclic GFR-binding peptide
AAAAKDYEDIYLISIPSLDQPVGPGPTG

SEQ ID NO: 5808 - protein, 31 aa, Artificial Sequence
  Cyclic GFR-binding peptide
AAAAAANSSDDIYLISIPSEETPVGGGWFWW

SEQ ID NO: 5809 - protein, 29 aa, Artificial Sequence
  Cyclic GFR-binding peptide
GGGGNSSDDIYLISIPSQGTPVGGPGPTG

SEQ ID NO: 5810 - protein, 32 aa, Artificial Sequence
  Cyclic GFR-binding peptide
GGGGGGNSSDDIYLISIPSHHVRSGGGGWFWW

SEQ ID NO: 5811 - protein, 30 aa, Artificial Sequence
  Cyclic GFR-binding peptide
AAAANNSSDIYLISIPSLQVQTGGGPGPTG

SEQ ID NO: 5812 - protein, 29 aa, Artificial Sequence
  Cyclic GFR-binding peptide
AAAAAAVGMDDIFLISIPSLETPVGWFWW

SEQ ID NO: 5813 - protein, 27 aa, Artificial Sequence
  Cyclic GFR-binding peptide
GGGGVVGKDIFLISIPSMKTPVPGPTG

SEQ ID NO: 5814 - protein, 30 aa, Artificial Sequence
  Cyclic GFR-binding peptide
GGGGGGQQKDNIFLISIPSLKTPVGGWFWW

SEQ ID NO: 5815 - protein, 28 aa, Artificial Sequence
  Cyclic GFR-binding peptide
AAAANNAADIFLISIPSLQTPVGPGPTG

SEQ ID NO: 5816 - protein, 31 aa, Artificial Sequence
  Cyclic GFR-binding peptide
AAAAAANNASDIFLISIPSLRTPVGGGWFWW

SEQ ID NO: 5817 - protein, 29 aa, Artificial Sequence
  Cyclic GFR-binding peptide
GGGGNSSDDIFLISIPSTKTPVGGPGPTG

SEQ ID NO: 5818 - protein, 32 aa, Artificial Sequence
  Cyclic GFR-binding peptide
GGGGGGVRGNDIFLISIPSLATPVGGGGWFWW

SEQ ID NO: 5819 - protein, 30 aa, Artificial Sequence
  Cyclic GFR-binding peptide
AAAAPKRGVIFLISIPSLDTPVGGGPGPTG

SEQ ID NO: 5820 - protein, 29 aa, Artificial Sequence
  Cyclic GFR-binding peptide
AAAAAAPTKGIIFLISIPSMKEPVGWFWW

SEQ ID NO: 5821 - protein, 27 aa, Artificial Sequence
  Cyclic GFR-binding peptide
GGGGPTRGVIFLISIPSLKTPAPGPTG

SEQ ID NO: 5822 - protein, 30 aa, Artificial Sequence
  Cyclic GFR-binding peptide
GGGGGGHPKIRIFLISIPSLQTPAGGWFWW

SEQ ID NO: 5823 - protein, 28 aa, Artificial Sequence
  Cyclic GFR-binding peptide
AAAAHPKIRIFLISIPSMKTPTGPGPTG

SEQ ID NO: 5824 - protein, 31 aa, Artificial Sequence
  Cyclic GFR-binding peptide
AAAAAAHPKIRIFLISIPSLRAPVGGGWFWW

SEQ ID NO: 5825 - protein, 29 aa, Artificial Sequence
  Cyclic GFR-binding peptide
GGGGHPKIRIFLISIPSTKVPAGGPGPTG

SEQ ID NO: 5826 - protein, 32 aa, Artificial Sequence
  Cyclic GFR-binding peptide
GGGGGGKRVYEIFLISIPSLAQPVGGGGWFWW

SEQ ID NO: 5827 - protein, 30 aa, Artificial Sequence
  Cyclic GFR-binding peptide
AAAAKRVIEIFLISIPSLDQSVGGGPGPTG

SEQ ID NO: 5828 - protein, 27 aa, Artificial Sequence
  Cyclic GFR-binding peptide
GGGGKENEDIFLISIPSLDQPVGWFWW

SEQ ID NO: 5829 - protein, 29 aa, Artificial Sequence
  Cyclic GFR-binding peptide
GGGGGGNKNEDIFLISIPSHHVRSPGPTG

SEQ ID NO: 5830 - protein, 28 aa, Artificial Sequence
  Cyclic GFR-binding peptide
AAAAKDYEDIFLISIPSLQVQTGGWFWW

SEQ ID NO: 5831 - protein, 30 aa, Artificial Sequence
  Cyclic GFR-binding peptide
AAAAAANSSDDVYLMSLPKLEVPAGPGPTG

SEQ ID NO: 5832 - protein, 29 aa, Artificial Sequence
  Cyclic GFR-binding peptide
GGGGNSSDDVYLMSLPKMKVPAGGGWFWW

SEQ ID NO: 5833 - protein, 31 aa, Artificial Sequence
  Cyclic GFR-binding peptide
GGGGGGNSSDDVYLMSLPKLKVPAGGPGPTG

SEQ ID NO: 5834 - protein, 30 aa, Artificial Sequence
  Cyclic GFR-binding peptide
AAAANNSSDVYLMSLPKLQVPAGGGGWFWW

SEQ ID NO: 5835 - protein, 32 aa, Artificial Sequence
  Cyclic GFR-binding peptide
AAAAAAVGMDDVYLMSLPKLRVPAGGGPGPTG

SEQ ID NO: 5836 - protein, 27 aa, Artificial Sequence
  Cyclic GFR-binding peptide
GGGGVVGKDVYLMSLPKLAVPAGWFWW

SEQ ID NO: 5837 - protein, 29 aa, Artificial Sequence
  Cyclic GFR-binding peptide
GGGGGGQQKDNVYLMSLPKLDVPAPGPTG

SEQ ID NO: 5838 - protein, 28 aa, Artificial Sequence
  Cyclic GFR-binding peptide
AAAANNAADVYLMSLPKLETPVGGWFWW

SEQ ID NO: 5839 - protein, 30 aa, Artificial Sequence
  Cyclic GFR-binding peptide
AAAAAANNASDVYLMSLPKMKEPVGPGPTG

SEQ ID NO: 5840 - protein, 29 aa, Artificial Sequence
  Cyclic GFR-binding peptide
GGGGNSSDDVYLMSLPKLKTPAGGGWFWW

SEQ ID NO: 5841 - protein, 31 aa, Artificial Sequence
  Cyclic GFR-binding peptide
GGGGGGVRGNDVYLMSLPKLQTPAGGPGPTG

SEQ ID NO: 5842 - protein, 30 aa, Artificial Sequence
  Cyclic GFR-binding peptide
AAAAPKRGVVYLMSLPKLKTPVGGGGWFWW

SEQ ID NO: 5843 - protein, 32 aa, Artificial Sequence
  Cyclic GFR-binding peptide
AAAAAAPTKGIVYLMSLPKMKTPTGGGPGPTG

SEQ ID NO: 5844 - protein, 27 aa, Artificial Sequence
  Cyclic GFR-binding peptide
GGGGPTRGVVYLMSLPKLRAPVGWFWW

SEQ ID NO: 5845 - protein, 29 aa, Artificial Sequence
  Cyclic GFR-binding peptide
GGGGGGHPKIRVYLMSLPKLRTPVPGPTG

SEQ ID NO: 5846 - protein, 28 aa, Artificial Sequence
  Cyclic GFR-binding peptide
AAAAHPKIRVYLMSLPKLAQPVGGWFWW

SEQ ID NO: 5847 - protein, 30 aa, Artificial Sequence
  Cyclic GFR-binding peptide
AAAAAAHPKIRVYLMSLPKLDQSVGPGPTG

SEQ ID NO: 5848 - protein, 29 aa, Artificial Sequence
  Cyclic GFR-binding peptide
GGGGHPKIRVYLMSLPKLDQPVGGGWFWW

SEQ ID NO: 5849 - protein, 31 aa, Artificial Sequence
  Cyclic GFR-binding peptide
GGGGGGKRVYEVYLMSLPKEETPVGGPGPTG

SEQ ID NO: 5850 - protein, 30 aa, Artificial Sequence
  Cyclic GFR-binding peptide
AAAAKRVIEVYLMSLPKQGTPVGGGGWFWW

SEQ ID NO: 5851 - protein, 30 aa, Artificial Sequence
  Cyclic GFR-binding peptide
GGGGKENEDVYLMSLPKHHVRSGGGPGPTG

SEQ ID NO: 5852 - protein, 29 aa, Artificial Sequence
  Cyclic GFR-binding peptide
GGGGGGNKNEDVYLMSLPKLQVQTGWFWW

SEQ ID NO: 5853 - protein, 27 aa, Artificial Sequence
  Cyclic GFR-binding peptide
AAAAKDYEDYYVIPLPELEQPVPGPTG

SEQ ID NO: 5854 - protein, 30 aa, Artificial Sequence
  Cyclic GFR-binding peptide
AAAAAANSSDDYYVIPLPEMKQPVGGWFWW

SEQ ID NO: 5855 - protein, 28 aa, Artificial Sequence
  Cyclic GFR-binding peptide
GGGGNSSDDYYVIPLPELKQPVGPGPTG

SEQ ID NO: 5856 - protein, 31 aa, Artificial Sequence
  Cyclic GFR-binding peptide
GGGGGGNSSDDYYVIPLPELQQPVGGGWFWW

SEQ ID NO: 5857 - protein, 29 aa, Artificial Sequence
  Cyclic GFR-binding peptide
AAAANNSSDYYVIPLPELRQPVGGPGPTG

SEQ ID NO: 5858 - protein, 32 aa, Artificial Sequence
  Cyclic GFR-binding peptide
AAAAAAVGMDDYYVIPLPETKQPVGGGGWFWW

SEQ ID NO: 5859 - protein, 30 aa, Artificial Sequence
  Cyclic GFR-binding peptide
GGGGVVGKDYYVIPLPELDQPVGGGPGPTG

SEQ ID NO: 5860 - protein, 29 aa, Artificial Sequence
  Cyclic GFR-binding peptide
GGGGGGQQKDNYYVIPLPELETPVGWFWW

SEQ ID NO: 5861 - protein, 27 aa, Artificial Sequence
  Cyclic GFR-binding peptide
AAAANNAADYYVIPLPEMKEPVPGPTG

SEQ ID NO: 5862 - protein, 30 aa, Artificial Sequence
  Cyclic GFR-binding peptide
AAAAAANNASDYYVIPLPELKTPAGGWFWW

SEQ ID NO: 5863 - protein, 28 aa, Artificial Sequence
  Cyclic GFR-binding peptide
GGGGNSSDDYYVIPLPELQTPAGPGPTG

SEQ ID NO: 5864 - protein, 31 aa, Artificial Sequence
  Cyclic GFR-binding peptide
GGGGGGVRGNDYYVIPLPELKTPVGGGWFWW

SEQ ID NO: 5865 - protein, 29 aa, Artificial Sequence
  Cyclic GFR-binding peptide
AAAAPKRGVYYVIPLPEMKTPTGGPGPTG

SEQ ID NO: 5866 - protein, 32 aa, Artificial Sequence
  Cyclic GFR-binding peptide
AAAAAAPTKGIYYVIPLPELRAPVGGGGWFWW

SEQ ID NO: 5867 - protein, 30 aa, Artificial Sequence
  Cyclic GFR-binding peptide
GGGGPTRGVYYVIPLPELRTPVGGGPGPTG

SEQ ID NO: 5868 - protein, 29 aa, Artificial Sequence
  Cyclic GFR-binding peptide
GGGGGGHPKIRYYVIPLPETKVPAGWFWW

SEQ ID NO: 5869 - protein, 27 aa, Artificial Sequence
  Cyclic GFR-binding peptide
AAAAHPKIRYYVIPLPELDQSVPGPTG

SEQ ID NO: 5870 - protein, 30 aa, Artificial Sequence
  Cyclic GFR-binding peptide
AAAAAAHPKIRYYVIPLPEEETPVGGWFWW

SEQ ID NO: 5871 - protein, 28 aa, Artificial Sequence
  Cyclic GFR-binding peptide
GGGGHPKIRYYVIPLPEQGTPVGPGPTG

SEQ ID NO: 5872 - protein, 31 aa, Artificial Sequence
  Cyclic GFR-binding peptide
GGGGGGKRVYEYYVIPLPEHHVRSGGGWFWW

SEQ ID NO: 5873 - protein, 29 aa, Artificial Sequence
  Cyclic GFR-binding peptide
AAAAKRVIEYYVIPLPELQVQTGGPGPTG

SEQ ID NO: 5874 - protein, 30 aa, Artificial Sequence
  Cyclic GFR-binding peptide
GGGGKENEDYYLITLPELEQSVGGGGWFWW

SEQ ID NO: 5875 - protein, 32 aa, Artificial Sequence
  Cyclic GFR-binding peptide
GGGGGGNKNEDYYLITLPEMKQSVGGGPGPTG

SEQ ID NO: 5876 - protein, 27 aa, Artificial Sequence
  Cyclic GFR-binding peptide
AAAAKDYEDYYLITLPELKQSVGWFWW

SEQ ID NO: 5877 - protein, 29 aa, Artificial Sequence
  Cyclic GFR-binding peptide
AAAAAANSSDDYYLITLPELQQSVPGPTG

SEQ ID NO: 5878 - protein, 28 aa, Artificial Sequence
  Cyclic GFR-binding peptide
GGGGNSSDDYYLITLPELRQSVGGWFWW

SEQ ID NO: 5879 - protein, 30 aa, Artificial Sequence
  Cyclic GFR-binding peptide
GGGGGGNSSDDYYLITLPETKQSVGPGPTG

SEQ ID NO: 5880 - protein, 29 aa, Artificial Sequence
  Cyclic GFR-binding peptide
AAAANNSSDYYLITLPELAQSVGGGWFWW

SEQ ID NO: 5881 - protein, 31 aa, Artificial Sequence
  Cyclic GFR-binding peptide
AAAAAAVGMDDYYLITLPELDQSVGGPGPTG

SEQ ID NO: 5882 - protein, 30 aa, Artificial Sequence
  Cyclic GFR-binding peptide
GGGGVVGKDYYLITLPELETPVGGGGWFWW

SEQ ID NO: 5883 - protein, 32 aa, Artificial Sequence
  Cyclic GFR-binding peptide
GGGGGGQQKDNYYLITLPEMKEPVGGGPGPTG

SEQ ID NO: 5884 - protein, 27 aa, Artificial Sequence
  Cyclic GFR-binding peptide
AAAANNAADYYLITLPELKTPAGWFWW

SEQ ID NO: 5885 - protein, 29 aa, Artificial Sequence
  Cyclic GFR-binding peptide
AAAAAANNASDYYLITLPELQTPAPGPTG

SEQ ID NO: 5886 - protein, 28 aa, Artificial Sequence
  Cyclic GFR-binding peptide
GGGGNSSDDYYLITLPELKTPVGGWFWW

SEQ ID NO: 5887 - protein, 30 aa, Artificial Sequence
  Cyclic GFR-binding peptide
GGGGGGVRGNDYYLITLPEMKTPTGPGPTG

SEQ ID NO: 5888 - protein, 29 aa, Artificial Sequence
  Cyclic GFR-binding peptide
AAAAPKRGVYYLITLPELRAPVGGGWFWW

SEQ ID NO: 5889 - protein, 31 aa, Artificial Sequence
  Cyclic GFR-binding peptide
AAAAAAPTKGIYYLITLPELRTPVGGPGPTG

SEQ ID NO: 5890 - protein, 30 aa, Artificial Sequence
  Cyclic GFR-binding peptide
GGGGPTRGVYYLITLPETKVPAGGGGWFWW

SEQ ID NO: 5891 - protein, 32 aa, Artificial Sequence
  Cyclic GFR-binding peptide
GGGGGGHPKIRYYLITLPELAQPVGGGPGPTG

SEQ ID NO: 5892 - protein, 27 aa, Artificial Sequence
  Cyclic GFR-binding peptide
AAAAHPKIRYYLITLPEEETPVGWFWW

SEQ ID NO: 5893 - protein, 29 aa, Artificial Sequence
  Cyclic GFR-binding peptide
AAAAAAHPKIRYYLITLPEQGTPVPGPTG

SEQ ID NO: 5894 - protein, 28 aa, Artificial Sequence
  Cyclic GFR-binding peptide
GGGGHPKIRYYLITLPEHHVRSGGWFWW

SEQ ID NO: 5895 - protein, 30 aa, Artificial Sequence
  Cyclic GFR-binding peptide
GGGGGGKRVYEYYLITLPELQVQTGPGPTG

SEQ ID NO: 5896 - protein, 29 aa, Artificial Sequence
  Cyclic GFR-binding peptide
AAAAKRVIEYYLITLPELEQPVGGGWFWW

SEQ ID NO: 5897 - protein, 29 aa, Artificial Sequence
  Cyclic GFR-binding peptide
GGGGKENEDYYLITLPEMKQPVGGPGPTG

SEQ ID NO: 5898 - protein, 32 aa, Artificial Sequence
  Cyclic GFR-binding peptide
GGGGGGNKNEDYYLITLPELKQPVGGGGWFWW

SEQ ID NO: 5899 - protein, 30 aa, Artificial Sequence
  Cyclic GFR-binding peptide
AAAAKDYEDYYLITLPELQQPVGGGPGPTG

SEQ ID NO: 5900 - protein, 29 aa, Artificial Sequence
  Cyclic GFR-binding peptide
AAAAAANSSDDYYLITLPELRQPVGWFWW

SEQ ID NO: 5901 - protein, 27 aa, Artificial Sequence
  Cyclic GFR-binding peptide
GGGGNSSDDYYLITLPETKQPVPGPTG

SEQ ID NO: 5902 - protein, 30 aa, Artificial Sequence
  Cyclic GFR-binding peptide
GGGGGGNSSDDYYLITLPELDQPVGGWFWW

SEQ ID NO: 5903 - protein, 28 aa, Artificial Sequence
  Cyclic GFR-binding peptide
AAAANNSSDMIQMTINSQGTPVGPGPTG

SEQ ID NO: 5904 - protein, 31 aa, Artificial Sequence
  Cyclic GFR-binding peptide
AAAAAAVGMDDMIQMTINSMKEPVGGGWFWW

SEQ ID NO: 5905 - protein, 29 aa, Artificial Sequence
  Cyclic GFR-binding peptide
GGGGVVGKDMIQMTINSLKTPAGGPGPTG

SEQ ID NO: 5906 - protein, 32 aa, Artificial Sequence
  Cyclic GFR-binding peptide
GGGGGGQQKDNMIQMTINSLQTPAGGGGWFWW

SEQ ID NO: 5907 - protein, 30 aa, Artificial Sequence
  Cyclic GFR-binding peptide
AAAANNAADMIQMTINSMKTPTGGGPGPTG

SEQ ID NO: 5908 - protein, 29 aa, Artificial Sequence
  Cyclic GFR-binding peptide
AAAAAANNASDMIQMTINSLRAPVGWFWW

SEQ ID NO: 5909 - protein, 27 aa, Artificial Sequence
  Cyclic GFR-binding peptide
GGGGNSSDDMIQMTINSTKVPAPGPTG

SEQ ID NO: 5910 - protein, 30 aa, Artificial Sequence
  Cyclic GFR-binding peptide
GGGGGGVRGNDMIQMTINSLAQPVGGWFWW

SEQ ID NO: 5911 - protein, 28 aa, Artificial Sequence
  Cyclic GFR-binding peptide
AAAAPKRGVMIQMTINSLDQSVGPGPTG

SEQ ID NO: 5912 - protein, 31 aa, Artificial Sequence
  Cyclic GFR-binding peptide
AAAAAAPTKGIMIQMTINSLDQPVGGGWFWW

SEQ ID NO: 5913 - protein, 29 aa, Artificial Sequence
  Cyclic GFR-binding peptide
GGGGPTRGVMIQMTINSHHVRSGGPGPTG

SEQ ID NO: 5914 - protein, 32 aa, Artificial Sequence
  Cyclic GFR-binding peptide
GGGGGGHPKIRMIQMTINSLQVQTGGGGWFWW

SEQ ID NO: 5915 - protein, 30 aa, Artificial Sequence
  Cyclic GFR-binding peptide
AAAAHPKIRVKAVKVSRLQVRSGGGPGPTG

SEQ ID NO: 5916 - protein, 29 aa, Artificial Sequence
  Cyclic GFR-binding peptide
AAAAAAHPKIRVKAVKVSRLETPVGWFWW

SEQ ID NO: 5917 - protein, 27 aa, Artificial Sequence
  Cyclic GFR-binding peptide
GGGGHPKIRVKAVKVSRMKEPVPGPTG

SEQ ID NO: 5918 - protein, 30 aa, Artificial Sequence
  Cyclic GFR-binding peptide
GGGGGGKRVYEVKAVKVSRLKTPAGGWFWW

SEQ ID NO: 5919 - protein, 28 aa, Artificial Sequence
  Cyclic GFR-binding peptide
AAAAKRVIEVKAVKVSRLQTPAGPGPTG

SEQ ID NO: 5920 - protein, 29 aa, Artificial Sequence
  Cyclic GFR-binding peptide
GGGGKENEDVKAVKVSRLKTPVGGGWFWW

SEQ ID NO: 5921 - protein, 31 aa, Artificial Sequence
  Cyclic GFR-binding peptide
GGGGGGNKNEDVKAVKVSRMKTPTGGPGPTG

SEQ ID NO: 5922 - protein, 30 aa, Artificial Sequence
  Cyclic GFR-binding peptide
AAAAKDYEDVKAVKVSRLRAPVGGGGWFWW

SEQ ID NO: 5923 - protein, 32 aa, Artificial Sequence
  Cyclic GFR-binding peptide
AAAAAANSSDDVKAVKVSRLRTPVGGGPGPTG

SEQ ID NO: 5924 - protein, 27 aa, Artificial Sequence
  Cyclic GFR-binding peptide
GGGGNSSDDVKAVKVSRTKVPAGWFWW

SEQ ID NO: 5925 - protein, 29 aa, Artificial Sequence
  Cyclic GFR-binding peptide
GGGGGGNSSDDVKAVKVSRLAQPVPGPTG

SEQ ID NO: 5926 - protein, 28 aa, Artificial Sequence
  Cyclic GFR-binding peptide
AAAANNSSDVKAVKVSRLDQSVGGWFWW

SEQ ID NO: 5927 - protein, 30 aa, Artificial Sequence
  Cyclic GFR-binding peptide
AAAAAAVGMDDVKAVKVSRLDQPVGPGPTG

SEQ ID NO: 5928 - protein, 29 aa, Artificial Sequence
  Cyclic GFR-binding peptide
GGGGVVGKDVKAVKVSREETPVGGGWFWW

SEQ ID NO: 5929 - protein, 31 aa, Artificial Sequence
  Cyclic GFR-binding peptide
GGGGGGQQKDNVKAVKVSRQGTPVGGPGPTG

SEQ ID NO: 5930 - protein, 30 aa, Artificial Sequence
  Cyclic GFR-binding peptide
AAAANNAADVKAVKVSRLQVQTGGGGWFWW

SEQ ID NO: 5931 - protein, 32 aa, Artificial Sequence
  Cyclic GFR-binding peptide
AAAAAANNASDIKRVQVPRHHVQTGGGPGPTG

SEQ ID NO: 5932 - protein, 27 aa, Artificial Sequence
  Cyclic GFR-binding peptide
GGGGNSSDDIKRVQVPRLETPVGWFWW

SEQ ID NO: 5933 - protein, 29 aa, Artificial Sequence
  Cyclic GFR-binding peptide
GGGGGGVRGNDIKRVQVPRMKEPVPGPTG

SEQ ID NO: 5934 - protein, 28 aa, Artificial Sequence
  Cyclic GFR-binding peptide
AAAAPKRGVIKRVQVPRLKTPAGGWFWW

SEQ ID NO: 5935 - protein, 30 aa, Artificial Sequence
  Cyclic GFR-binding peptide
AAAAAAPTKGIIKRVQVPRLQTPAGPGPTG

SEQ ID NO: 5936 - protein, 29 aa, Artificial Sequence
  Cyclic GFR-binding peptide
GGGGPTRGVIKRVQVPRLKTPVGGGWFWW

SEQ ID NO: 5937 - protein, 31 aa, Artificial Sequence
  Cyclic GFR-binding peptide
GGGGGGHPKIRIKRVQVPRMKTPTGGPGPTG

SEQ ID NO: 5938 - protein, 30 aa, Artificial Sequence
  Cyclic GFR-binding peptide
AAAAHPKIRIKRVQVPRLRAPVGGGGWFWW

SEQ ID NO: 5939 - protein, 32 aa, Artificial Sequence
  Cyclic GFR-binding peptide
AAAAAAHPKIRIKRVQVPRLRTPVGGGPGPTG

SEQ ID NO: 5940 - protein, 27 aa, Artificial Sequence
  Cyclic GFR-binding peptide
GGGGHPKIRIKRVQVPRTKVPAGWFWW

SEQ ID NO: 5941 - protein, 29 aa, Artificial Sequence
  Cyclic GFR-binding peptide
GGGGGGKRVYEIKRVQVPRLAQPVPGPTG

SEQ ID NO: 5942 - protein, 28 aa, Artificial Sequence
  Cyclic GFR-binding peptide
AAAAKRVIEIKRVQVPRLDQSVGGWFWW

SEQ ID NO: 5943 - protein, 28 aa, Artificial Sequence
  Cyclic GFR-binding peptide
GGGGKENEDIKRVQVPRLDQPVGPGPTG

SEQ ID NO: 5944 - protein, 31 aa, Artificial Sequence
  Cyclic GFR-binding peptide
GGGGGGNKNEDIKRVQVPREETPVGGGWFWW

SEQ ID NO: 5945 - protein, 29 aa, Artificial Sequence
  Cyclic GFR-binding peptide
AAAAKDYEDIKRVQVPRQGTPVGGPGPTG

SEQ ID NO: 5946 - protein, 32 aa, Artificial Sequence
  Cyclic GFR-binding peptide
AAAAAANSSDDIKRVQVPRHHVRSGGGGWFWW

SEQ ID NO: 5947 - protein, 27 aa, Artificial Sequence
  Cyclic GFR-binding peptide
GGGGVVKENEDLYLISIASGGGPGPTG

SEQ ID NO: 5948 - protein, 26 aa, Artificial Sequence
  Cyclic GFR-binding peptide
GGGGGGVVNKNEDLYLVSIASGWFWW

SEQ ID NO: 5949 - protein, 24 aa, Artificial Sequence
  Cyclic GFR-binding peptide
AAAAVVKDYEDFFLMSLSSPGPTG

SEQ ID NO: 5950 - protein, 27 aa, Artificial Sequence
  Cyclic GFR-binding peptide
AAAAAAIVNSSDDFFLVSLSSGGWFWW

SEQ ID NO: 5951 - protein, 25 aa, Artificial Sequence
  Cyclic GFR-binding peptide
GGGGIVNSSDDFYLMSIANGPGPTG

SEQ ID NO: 5952 - protein, 28 aa, Artificial Sequence
  Cyclic GFR-binding peptide
GGGGGGIVNSSDDFYLISIANGGGWFWW

SEQ ID NO: 5953 - protein, 26 aa, Artificial Sequence
  Cyclic GFR-binding peptide
AAAAIVNNSSDYYLMSTASGGPGPTG

SEQ ID NO: 5954 - protein, 29 aa, Artificial Sequence
  Cyclic GFR-binding peptide
AAAAAATPVGMDDYYLISTASGGGGWFWW

SEQ ID NO: 5955 - protein, 27 aa, Artificial Sequence
  Cyclic GFR-binding peptide
GGGGYTVVGKDKYLMSIPSGGGPGPTG

SEQ ID NO: 5956 - protein, 26 aa, Artificial Sequence
  Cyclic GFR-binding peptide
GGGGGGIIQQKDNKYLISIPSGWFWW

SEQ ID NO: 5957 - protein, 24 aa, Artificial Sequence
  Cyclic GFR-binding peptide
AAAAVVNNAADLYLMSIPEPGPTG

SEQ ID NO: 5958 - protein, 27 aa, Artificial Sequence
  Cyclic GFR-binding peptide
AAAAAAVVNNASDLYLVSIPEGGWFWW

SEQ ID NO: 5959 - protein, 25 aa, Artificial Sequence
  Cyclic GFR-binding peptide
GGGGIVNSSDDFYLINIPSGPGPTG

SEQ ID NO: 5960 - protein, 28 aa, Artificial Sequence
  Cyclic GFR-binding peptide
GGGGGGLLVRGNDFYLVNIPSGGGWFWW

SEQ ID NO: 5961 - protein, 26 aa, Artificial Sequence
  Cyclic GFR-binding peptide
AAAAVKPKRGVIYLMSIPSGGPGPTG

SEQ ID NO: 5962 - protein, 29 aa, Artificial Sequence
  Cyclic GFR-binding peptide
AAAAAAIKPTKGIIYLVSIPSGGGGWFWW

SEQ ID NO: 5963 - protein, 27 aa, Artificial Sequence
  Cyclic GFR-binding peptide
GGGGVKPTRGVIFLMSIPSGGGPGPTG

SEQ ID NO: 5964 - protein, 28 aa, Artificial Sequence
  Cyclic GFR-binding peptide
GGGGGGHQGQHPKIRIFLVSIPSGWFWW

SEQ ID NO: 5965 - protein, 26 aa, Artificial Sequence
  Cyclic GFR-binding peptide
AAAAHQGQHPKIRVYLISLPKPGPTG

SEQ ID NO: 5966 - protein, 29 aa, Artificial Sequence
  Cyclic GFR-binding peptide
AAAAAAHQGQHPKIRVYLVSLPKGGWFWW

SEQ ID NO: 5967 - protein, 27 aa, Artificial Sequence
  Cyclic GFR-binding peptide
GGGGHQGQHPKIRYYVMPLPEGPGPTG

SEQ ID NO: 5968 - protein, 30 aa, Artificial Sequence
  Cyclic GFR-binding peptide
GGGGGGLKPKKRVYEYYVVPLPEGGGWFWW

SEQ ID NO: 5969 - protein, 28 aa, Artificial Sequence
  Cyclic GFR-binding peptide
AAAAFIPKKRVIEYYLMTLPEGGPGPTG

SEQ ID NO: 5970 - protein, 29 aa, Artificial Sequence
  Cyclic GFR-binding peptide
AAAAAAVVKENEDYYLVTLPEGGGGWFWW

SEQ ID NO: 5971 - protein, 27 aa, Artificial Sequence
  Cyclic GFR-binding peptide
GGGGVVNKNEDMIQITINSGGGPGPTG

SEQ ID NO: 5972 - protein, 26 aa, Artificial Sequence
  Cyclic GFR-binding peptide
GGGGGGVVKDYEDMIQVTINSGWFWW

SEQ ID NO: 5973 - protein, 24 aa, Artificial Sequence
  Cyclic GFR-binding peptide
AAAAIVNSSDDVKAMKVSRPGPTG

SEQ ID NO: 5974 - protein, 27 aa, Artificial Sequence
  Cyclic GFR-binding peptide
AAAAAAIVNSSDDVKAIKVSRGGWFWW

SEQ ID NO: 5975 - protein, 25 aa, Artificial Sequence
  Cyclic GFR-binding peptide
GGGGIVNSSDDIKRMQVPRGPGPTG

SEQ ID NO: 5976 - protein, 28 aa, Artificial Sequence
  Cyclic GFR-binding peptide
GGGGGGIVNNSSDIKRIQVPRGGGWFWW

SEQ ID NO: 5977 - protein, 26 aa, Artificial Sequence
  Cyclic GFR-binding peptide
AAAATPVGMDDLYLMSIASGGPGPTG

SEQ ID NO: 5978 - protein, 29 aa, Artificial Sequence
  Cyclic GFR-binding peptide
AAAAAAYTVVGKDFFLISLSSGGGGWFWW

SEQ ID NO: 5979 - protein, 27 aa, Artificial Sequence
  Cyclic GFR-binding peptide
GGGGIIQQKDNFYLVSIANGGGPGPTG

SEQ ID NO: 5980 - protein, 26 aa, Artificial Sequence
  Cyclic GFR-binding peptide
GGGGGGVVNNAADYYLVSTASGWFWW

SEQ ID NO: 5981 - protein, 24 aa, Artificial Sequence
  Cyclic GFR-binding peptide
AAAAVVNNASDKYLVSIPSPGPTG

SEQ ID NO: 5982 - protein, 27 aa, Artificial Sequence
  Cyclic GFR-binding peptide
AAAAAAIVNSSDDLYLISIPEGGWFWW

SEQ ID NO: 5983 - protein, 25 aa, Artificial Sequence
  Cyclic GFR-binding peptide
GGGGLLVRGNDFYLMNIPSGPGPTG

SEQ ID NO: 5984 - protein, 28 aa, Artificial Sequence
  Cyclic GFR-binding peptide
GGGGGGVKPKRGVIYLISIPSGGGWFWW

SEQ ID NO: 5985 - protein, 26 aa, Artificial Sequence
  Cyclic GFR-binding peptide
AAAAIKPTKGIIFLISIPSGGPGPTG

SEQ ID NO: 5986 - protein, 29 aa, Artificial Sequence
  Cyclic GFR-binding peptide
AAAAAAVKPTRGVVYLMSLPKGGGGWFWW

SEQ ID NO: 5987 - protein, 29 aa, Artificial Sequence
  Cyclic GFR-binding peptide
GGGGHQGQHPKIRYYVIPLPEGGGPGPTG

SEQ ID NO: 5988 - protein, 28 aa, Artificial Sequence
  Cyclic GFR-binding peptide
GGGGGGHQGQHPKIRYYLITLPEGWFWW

SEQ ID NO: 5989 - protein, 26 aa, Artificial Sequence
  Cyclic GFR-binding peptide
AAAAHQGQHPKIRMIQMTINSPGPTG

SEQ ID NO: 5990 - protein, 29 aa, Artificial Sequence
  Cyclic GFR-binding peptide
AAAAAAHQGQHPKIRVKAVKVSRGGWFWW

SEQ ID NO: 5991 - protein, 27 aa, Artificial Sequence
  Cyclic GFR-binding peptide
GGGGLKPKKRVYEIKRVQVPRGPGPTG

SEQ ID NO: 5992 - protein, 20 aa, Artificial Sequence
  Cyclic GFR-binding peptide
GGGGLYLISIASGGGPGPTG

SEQ ID NO: 5993 - protein, 19 aa, Artificial Sequence
  Cyclic GFR-binding peptide
GGGGGGLYLVSIASGWFWW

SEQ ID NO: 5994 - protein, 17 aa, Artificial Sequence
  Cyclic GFR-binding peptide
AAAAFFLMSLSSPGPTG

SEQ ID NO: 5995 - protein, 20 aa, Artificial Sequence
  Cyclic GFR-binding peptide
AAAAAAFFLVSLSSGGWFWW

SEQ ID NO: 5996 - protein, 18 aa, Artificial Sequence
  Cyclic GFR-binding peptide
GGGGFYLMSIANGPGPTG

SEQ ID NO: 5997 - protein, 21 aa, Artificial Sequence
  Cyclic GFR-binding peptide
GGGGGGFYLISIANGGGWFWW

SEQ ID NO: 5998 - protein, 19 aa, Artificial Sequence
  Cyclic GFR-binding peptide
AAAAYYLMSTASGGPGPTG

SEQ ID NO: 5999 - protein, 22 aa, Artificial Sequence
  Cyclic GFR-binding peptide
AAAAAAYYLISTASGGGGWFWW

SEQ ID NO: 6000 - protein, 20 aa, Artificial Sequence
  Cyclic GFR-binding peptide
GGGGKYLMSIPSGGGPGPTG

SEQ ID NO: 6001 - protein, 19 aa, Artificial Sequence
  Cyclic GFR-binding peptide
GGGGGGKYLISIPSGWFWW

SEQ ID NO: 6002 - protein, 17 aa, Artificial Sequence
  Cyclic GFR-binding peptide
AAAALYLMSIPEPGPTG

SEQ ID NO: 6003 - protein, 20 aa, Artificial Sequence
  Cyclic GFR-binding peptide
AAAAAALYLVSIPEGGWFWW

SEQ ID NO: 6004 - protein, 18 aa, Artificial Sequence
  Cyclic GFR-binding peptide
GGGGFYLINIPSGPGPTG

SEQ ID NO: 6005 - protein, 21 aa, Artificial Sequence
  Cyclic GFR-binding peptide
GGGGGGFYLVNIPSGGGWFWW

SEQ ID NO: 6006 - protein, 19 aa, Artificial Sequence
  Cyclic GFR-binding peptide
AAAAIYLMSIPSGGPGPTG

SEQ ID NO: 6007 - protein, 22 aa, Artificial Sequence
  Cyclic GFR-binding peptide
AAAAAAIYLVSIPSGGGGWFWW

SEQ ID NO: 6008 - protein, 20 aa, Artificial Sequence
  Cyclic GFR-binding peptide
GGGGIFLMSIPSGGGPGPTG

SEQ ID NO: 6009 - protein, 19 aa, Artificial Sequence
  Cyclic GFR-binding peptide
GGGGGGIFLVSIPSGWFWW

SEQ ID NO: 6010 - protein, 17 aa, Artificial Sequence
  Cyclic GFR-binding peptide
AAAAVYLISLPKPGPTG

SEQ ID NO: 6011 - protein, 20 aa, Artificial Sequence
  Cyclic GFR-binding peptide
AAAAAAVYLVSLPKGGWFWW

SEQ ID NO: 6012 - protein, 18 aa, Artificial Sequence
  Cyclic GFR-binding peptide
GGGGYYVMPLPEGPGPTG

SEQ ID NO: 6013 - protein, 21 aa, Artificial Sequence
  Cyclic GFR-binding peptide
GGGGGGYYVVPLPEGGGWFWW

SEQ ID NO: 6014 - protein, 19 aa, Artificial Sequence
  Cyclic GFR-binding peptide
AAAAYYLMTLPEGGPGPTG

SEQ ID NO: 6015 - protein, 22 aa, Artificial Sequence
  Cyclic GFR-binding peptide
AAAAAAYYLVTLPEGGGGWFWW

SEQ ID NO: 6016 - protein, 20 aa, Artificial Sequence
  Cyclic GFR-binding peptide
GGGGMIQITINSGGGPGPTG

SEQ ID NO: 6017 - protein, 19 aa, Artificial Sequence
  Cyclic GFR-binding peptide
GGGGGGMIQVTINSGWFWW

SEQ ID NO: 6018 - protein, 17 aa, Artificial Sequence
  Cyclic GFR-binding peptide
AAAAVKAMKVSRPGPTG

SEQ ID NO: 6019 - protein, 20 aa, Artificial Sequence
  Cyclic GFR-binding peptide
AAAAAAVKAIKVSRGGWFWW

SEQ ID NO: 6020 - protein, 18 aa, Artificial Sequence
  Cyclic GFR-binding peptide
GGGGIKRMQVPRGPGPTG

SEQ ID NO: 6021 - protein, 21 aa, Artificial Sequence
  Cyclic GFR-binding peptide
GGGGGGIKRIQVPRGGGWFWW

SEQ ID NO: 6022 - protein, 19 aa, Artificial Sequence
  Cyclic GFR-binding peptide
AAAALYLMSIASGGPGPTG

SEQ ID NO: 6023 - protein, 22 aa, Artificial Sequence
  Cyclic GFR-binding peptide
AAAAAAFFLISLSSGGGGWFWW

SEQ ID NO: 6024 - protein, 20 aa, Artificial Sequence
  Cyclic GFR-binding peptide
GGGGFYLVSIANGGGPGPTG

SEQ ID NO: 6025 - protein, 19 aa, Artificial Sequence
  Cyclic GFR-binding peptide
GGGGGGYYLVSTASGWFWW

SEQ ID NO: 6026 - protein, 17 aa, Artificial Sequence
  Cyclic GFR-binding peptide
AAAAKYLVSIPSPGPTG

SEQ ID NO: 6027 - protein, 20 aa, Artificial Sequence
  Cyclic GFR-binding peptide
AAAAAALYLISIPEGGWFWW

SEQ ID NO: 6028 - protein, 18 aa, Artificial Sequence
  Cyclic GFR-binding peptide
GGGGFYLMNIPSGPGPTG

SEQ ID NO: 6029 - protein, 21 aa, Artificial Sequence
  Cyclic GFR-binding peptide
GGGGGGIYLISIPSGGGWFWW

SEQ ID NO: 6030 - protein, 19 aa, Artificial Sequence
  Cyclic GFR-binding peptide
AAAAIFLISIPSGGPGPTG

SEQ ID NO: 6031 - protein, 22 aa, Artificial Sequence
  Cyclic GFR-binding peptide
AAAAAAVYLMSLPKGGGGWFWW

SEQ ID NO: 6032 - protein, 20 aa, Artificial Sequence
  Cyclic GFR-binding peptide
GGGGYYVIPLPEGGGPGPTG

SEQ ID NO: 6033 - protein, 19 aa, Artificial Sequence
  Cyclic GFR-binding peptide
GGGGGGYYLITLPEGWFWW

SEQ ID NO: 6034 - protein, 17 aa, Artificial Sequence
  Cyclic GFR-binding peptide
AAAAMIQMTINSPGPTG

SEQ ID NO: 6035 - protein, 20 aa, Artificial Sequence
  Cyclic GFR-binding peptide
AAAAAAVKAVKVSRGGWFWW

SEQ ID NO: 6036 - protein, 18 aa, Artificial Sequence
  Cyclic GFR-binding peptide
GGGGIKRVQVPRGPGPTG

SEQ ID NO: 6037 - protein, 15 aa, Artificial Sequence
  Cyclic GFR-binding peptide
GGGGGGGLYLISIAS

SEQ ID NO: 6038 - protein, 16 aa, Artificial Sequence
  Cyclic GFR-binding peptide
GGGGGGGGLYLVSIAS

SEQ ID NO: 6039 - protein, 15 aa, Artificial Sequence
  Cyclic GFR-binding peptide
AAAAAAAFFLMSLSS

SEQ ID NO: 6040 - protein, 16 aa, Artificial Sequence
  Cyclic GFR-binding peptide
AAAAAAAAFFLVSLSS

SEQ ID NO: 6041 - protein, 15 aa, Artificial Sequence
  Cyclic GFR-binding peptide
GGGGGGGFYLMSIAN

SEQ ID NO: 6042 - protein, 16 aa, Artificial Sequence
  Cyclic GFR-binding peptide
GGGGGGGGFYLISIAN

SEQ ID NO: 6043 - protein, 15 aa, Artificial Sequence
  Cyclic GFR-binding peptide
AAAAAAAYYLMSTAS

SEQ ID NO: 6044 - protein, 16 aa, Artificial Sequence
  Cyclic GFR-binding peptide
AAAAAAAAYYLISTAS

SEQ ID NO: 6045 - protein, 15 aa, Artificial Sequence
  Cyclic GFR-binding peptide
GGGGGGGKYLMSIPS

SEQ ID NO: 6046 - protein, 16 aa, Artificial Sequence
  Cyclic GFR-binding peptide
GGGGGGGGKYLISIPS

SEQ ID NO: 6047 - protein, 15 aa, Artificial Sequence
  Cyclic GFR-binding peptide
AAAAAAALYLMSIPE

SEQ ID NO: 6048 - protein, 16 aa, Artificial Sequence
  Cyclic GFR-binding peptide
AAAAAAAALYLVSIPE

SEQ ID NO: 6049 - protein, 15 aa, Artificial Sequence
  Cyclic GFR-binding peptide
GGGGGGGFYLINIPS

SEQ ID NO: 6050 - protein, 16 aa, Artificial Sequence
  Cyclic GFR-binding peptide
GGGGGGGGFYLVNIPS

SEQ ID NO: 6051 - protein, 15 aa, Artificial Sequence
  Cyclic GFR-binding peptide
AAAAAAAIYLMSIPS

SEQ ID NO: 6052 - protein, 16 aa, Artificial Sequence
  Cyclic GFR-binding peptide
AAAAAAAAIYLVSIPS

SEQ ID NO: 6053 - protein, 15 aa, Artificial Sequence
  Cyclic GFR-binding peptide
GGGGGGGIFLMSIPS

SEQ ID NO: 6054 - protein, 16 aa, Artificial Sequence
  Cyclic GFR-binding peptide
GGGGGGGGIFLVSIPS

SEQ ID NO: 6055 - protein, 15 aa, Artificial Sequence
  Cyclic GFR-binding peptide
AAAAAAAVYLISLPK

SEQ ID NO: 6056 - protein, 16 aa, Artificial Sequence
  Cyclic GFR-binding peptide
AAAAAAAAVYLVSLPK

SEQ ID NO: 6057 - protein, 15 aa, Artificial Sequence
  Cyclic GFR-binding peptide
GGGGGGGYYVMPLPE

SEQ ID NO: 6058 - protein, 16 aa, Artificial Sequence
  Cyclic GFR-binding peptide
GGGGGGGGYYVVPLPE

SEQ ID NO: 6059 - protein, 15 aa, Artificial Sequence
  Cyclic GFR-binding peptide
AAAAAAAYYLMTLPE

SEQ ID NO: 6060 - protein, 16 aa, Artificial Sequence
  Cyclic GFR-binding peptide
AAAAAAAAYYLVTLPE

SEQ ID NO: 6061 - protein, 15 aa, Artificial Sequence
  Cyclic GFR-binding peptide
GGGGGGGMIQITINS

SEQ ID NO: 6062 - protein, 16 aa, Artificial Sequence
  Cyclic GFR-binding peptide
GGGGGGGGMIQVTINS

SEQ ID NO: 6063 - protein, 15 aa, Artificial Sequence
  Cyclic GFR-binding peptide
AAAAAAAVKAMKVSR

SEQ ID NO: 6064 - protein, 16 aa, Artificial Sequence
  Cyclic GFR-binding peptide
AAAAAAAAVKAIKVSR

SEQ ID NO: 6065 - protein, 15 aa, Artificial Sequence
  Cyclic GFR-binding peptide
GGGGGGGIKRMQVPR

SEQ ID NO: 6066 - protein, 16 aa, Artificial Sequence
  Cyclic GFR-binding peptide
GGGGGGGGIKRIQVPR

SEQ ID NO: 6067 - protein, 15 aa, Artificial Sequence
  Cyclic GFR-binding peptide
AAAAAAALYLMSIAS

SEQ ID NO: 6068 - protein, 16 aa, Artificial Sequence
  Cyclic GFR-binding peptide
AAAAAAAAFFLISLSS

SEQ ID NO: 6069 - protein, 15 aa, Artificial Sequence
  Cyclic GFR-binding peptide
GGGGGGGFYLVSIAN

SEQ ID NO: 6070 - protein, 16 aa, Artificial Sequence
  Cyclic GFR-binding peptide
GGGGGGGGYYLVSTAS

SEQ ID NO: 6071 - protein, 15 aa, Artificial Sequence
  Cyclic GFR-binding peptide
AAAAAAAKYLVSIPS

SEQ ID NO: 6072 - protein, 16 aa, Artificial Sequence
  Cyclic GFR-binding peptide
AAAAAAAALYLISIPE

SEQ ID NO: 6073 - protein, 15 aa, Artificial Sequence
  Cyclic GFR-binding peptide
GGGGGGGFYLMNIPS

SEQ ID NO: 6074 - protein, 16 aa, Artificial Sequence
  Cyclic GFR-binding peptide
GGGGGGGGIYLISIPS

SEQ ID NO: 6075 - protein, 15 aa, Artificial Sequence
  Cyclic GFR-binding peptide
AAAAAAAIFLISIPS

SEQ ID NO: 6076 - protein, 16 aa, Artificial Sequence
  Cyclic GFR-binding peptide
AAAAAAAAVYLMSLPK

SEQ ID NO: 6077 - protein, 15 aa, Artificial Sequence
  Cyclic GFR-binding peptide
GGGGGGGYYVIPLPE

SEQ ID NO: 6078 - protein, 16 aa, Artificial Sequence
  Cyclic GFR-binding peptide
GGGGGGGGYYLITLPE

SEQ ID NO: 6079 - protein, 15 aa, Artificial Sequence
  Cyclic GFR-binding peptide
AAAAAAAMIQMTINS

SEQ ID NO: 6080 - protein, 16 aa, Artificial Sequence
  Cyclic GFR-binding peptide
AAAAAAAAVKAVKVSR

SEQ ID NO: 6081 - protein, 15 aa, Artificial Sequence
  Cyclic GFR-binding peptide
GGGGGGGIKRVQVPR

SEQ ID NO: 6082 - protein, 27 aa, Artificial Sequence
  Cyclic GFR-binding peptide
GGGGKENEDLYLMSIASMKTPVHPKIR

SEQ ID NO: 6083 - protein, 29 aa, Artificial Sequence
  Cyclic GFR-binding peptide
GGGGGGNKNEDLYLMSIASLKTPVKRVYE

SEQ ID NO: 6084 - protein, 27 aa, Artificial Sequence
  Cyclic GFR-binding peptide
AAAAKDYEDLYLMSIASLQTPVKRVIE

SEQ ID NO: 6085 - protein, 29 aa, Artificial Sequence
  Cyclic GFR-binding peptide
AAAAAANSSDDLYLMSIASLRTPVKENED

SEQ ID NO: 6086 - protein, 27 aa, Artificial Sequence
  Cyclic GFR-binding peptide
GGGGNSSDDLYLMSIASTKTPVNKNED

SEQ ID NO: 6087 - protein, 29 aa, Artificial Sequence
  Cyclic GFR-binding peptide
GGGGGGNSSDDLYLMSIASLATPVKDYED

SEQ ID NO: 6088 - protein, 27 aa, Artificial Sequence
  Cyclic GFR-binding peptide
AAAANNSSDLYLMSIASLDTPVNSSDD

SEQ ID NO: 6089 - protein, 29 aa, Artificial Sequence
  Cyclic GFR-binding peptide
AAAAAAVGMDDLYLMSIASMKEPVNSSDD

SEQ ID NO: 6090 - protein, 27 aa, Artificial Sequence
  Cyclic GFR-binding peptide
GGGGVVGKDLYLMSIASLKTPANSSDD

SEQ ID NO: 6091 - protein, 29 aa, Artificial Sequence
  Cyclic GFR-binding peptide
GGGGGGQQKDNLYLMSIASLQTPANNSSD

SEQ ID NO: 6092 - protein, 27 aa, Artificial Sequence
  Cyclic GFR-binding peptide
AAAANNAADLYLMSIASMKTPTVGMDD

SEQ ID NO: 6093 - protein, 29 aa, Artificial Sequence
  Cyclic GFR-binding peptide
AAAAAANNASDLYLMSIASLRAPVVVGKD

SEQ ID NO: 6094 - protein, 27 aa, Artificial Sequence
  Cyclic GFR-binding peptide
GGGGNSSDDLYLMSIASTKVPAQQKDN

SEQ ID NO: 6095 - protein, 29 aa, Artificial Sequence
  Cyclic GFR-binding peptide
GGGGGGVRGNDLYLMSIASLAQPVNNAAD

SEQ ID NO: 6096 - protein, 27 aa, Artificial Sequence
  Cyclic GFR-binding peptide
AAAAPKRGVLYLMSIASLDQSVNNASD

SEQ ID NO: 6097 - protein, 29 aa, Artificial Sequence
  Cyclic GFR-binding peptide
AAAAAAPTKGILYLMSIASLDQPVNSSDD

SEQ ID NO: 6098 - protein, 27 aa, Artificial Sequence
  Cyclic GFR-binding peptide
GGGGPTRGVLYLMSIASHHVRSVRGND

SEQ ID NO: 6099 - protein, 29 aa, Artificial Sequence
  Cyclic GFR-binding peptide
GGGGGGHPKIRLYLMSIASLQVQTPKRGV

SEQ ID NO: 6100 - protein, 27 aa, Artificial Sequence
  Cyclic GFR-binding peptide
AAAAHPKIRFFLISLSSLEEPVPTKGI

SEQ ID NO: 6101 - protein, 29 aa, Artificial Sequence
  Cyclic GFR-binding peptide
AAAAAAHPKIRFFLISLSSLKEPVPTRGV

SEQ ID NO: 6102 - protein, 27 aa, Artificial Sequence
  Cyclic GFR-binding peptide
GGGGHPKIRFFLISLSSLQEPVHPKIR

SEQ ID NO: 6103 - protein, 29 aa, Artificial Sequence
  Cyclic GFR-binding peptide
GGGGGGKRVYEFFLISLSSMKEPVHPKIR

SEQ ID NO: 6104 - protein, 27 aa, Artificial Sequence
  Cyclic GFR-binding peptide
AAAAKRVIEFFLISLSSLREPVHPKIR

SEQ ID NO: 6105 - protein, 27 aa, Artificial Sequence
  Cyclic GFR-binding peptide
GGGGKENEDFFLISLSSTKEPVKENED

SEQ ID NO: 6106 - protein, 29 aa, Artificial Sequence
  Cyclic GFR-binding peptide
GGGGGGNKNEDFFLISLSSLAEPVNKNED

SEQ ID NO: 6107 - protein, 27 aa, Artificial Sequence
  Cyclic GFR-binding peptide
AAAAKDYEDFFLISLSSLDEPVKDYED

SEQ ID NO: 6108 - protein, 29 aa, Artificial Sequence
  Cyclic GFR-binding peptide
AAAAAANSSDDFFLISLSSLETPVNSSDD

SEQ ID NO: 6109 - protein, 27 aa, Artificial Sequence
  Cyclic GFR-binding peptide
GGGGNSSDDFFLISLSSLKTPANSSDD

SEQ ID NO: 6110 - protein, 29 aa, Artificial Sequence
  Cyclic GFR-binding peptide
GGGGGGNSSDDFFLISLSSLQTPANSSDD

SEQ ID NO: 6111 - protein, 27 aa, Artificial Sequence
  Cyclic GFR-binding peptide
AAAANNSSDFFLISLSSLKTPVNNSSD

SEQ ID NO: 6112 - protein, 29 aa, Artificial Sequence
  Cyclic GFR-binding peptide
AAAAAAVGMDDFFLISLSSMKTPTVGMDD

SEQ ID NO: 6113 - protein, 27 aa, Artificial Sequence
  Cyclic GFR-binding peptide
GGGGVVGKDFFLISLSSLRAPVVVGKD

SEQ ID NO: 6114 - protein, 29 aa, Artificial Sequence
  Cyclic GFR-binding peptide
GGGGGGQQKDNFFLISLSSLRTPVQQKDN

SEQ ID NO: 6115 - protein, 27 aa, Artificial Sequence
  Cyclic GFR-binding peptide
AAAANNAADFFLISLSSTKVPANNAAD

SEQ ID NO: 6116 - protein, 29 aa, Artificial Sequence
  Cyclic GFR-binding peptide
AAAAAANNASDFFLISLSSLAQPVNNASD

SEQ ID NO: 6117 - protein, 27 aa, Artificial Sequence
  Cyclic GFR-binding peptide
GGGGNSSDDFFLISLSSLDQSVNSSDD

SEQ ID NO: 6118 - protein, 29 aa, Artificial Sequence
  Cyclic GFR-binding peptide
GGGGGGVRGNDFFLISLSSLDQPVVRGND

SEQ ID NO: 6119 - protein, 27 aa, Artificial Sequence
  Cyclic GFR-binding peptide
AAAAPKRGVFFLISLSSEETPVPKRGV

SEQ ID NO: 6120 - protein, 29 aa, Artificial Sequence
  Cyclic GFR-binding peptide
AAAAAAPTKGIFFLISLSSQGTPVPTKGI

SEQ ID NO: 6121 - protein, 27 aa, Artificial Sequence
  Cyclic GFR-binding peptide
GGGGPTRGVFFLISLSSHHVRSPTRGV

SEQ ID NO: 6122 - protein, 29 aa, Artificial Sequence
  Cyclic GFR-binding peptide
GGGGGGHPKIRFFLISLSSLQVQTHPKIR

SEQ ID NO: 6123 - protein, 27 aa, Artificial Sequence
  Cyclic GFR-binding peptide
AAAAHPKIRFYLVSIANLETPAHPKIR

SEQ ID NO: 6124 - protein, 29 aa, Artificial Sequence
  Cyclic GFR-binding peptide
AAAAAAHPKIRFYLVSIANMKTPAHPKIR

SEQ ID NO: 6125 - protein, 27 aa, Artificial Sequence
  Cyclic GFR-binding peptide
GGGGHPKIRFYLVSIANLKTPAHPKIR

SEQ ID NO: 6126 - protein, 29 aa, Artificial Sequence
  Cyclic GFR-binding peptide
GGGGGGKRVYEFYLVSIANLRTPAKRVYE

SEQ ID NO: 6127 - protein, 27 aa, Artificial Sequence
  Cyclic GFR-binding peptide
AAAAKRVIEFYLVSIANTKTPAKRVIE

SEQ ID NO: 6128 - protein, 27 aa, Artificial Sequence
  Cyclic GFR-binding peptide
GGGGKENEDFYLVSIANLATPAKENED

SEQ ID NO: 6129 - protein, 29 aa, Artificial Sequence
  Cyclic GFR-binding peptide
GGGGGGNKNEDFYLVSIANLDTPANKNED

SEQ ID NO: 6130 - protein, 27 aa, Artificial Sequence
  Cyclic GFR-binding peptide
AAAAKDYEDFYLVSIANLETPVKDYED

SEQ ID NO: 6131 - protein, 29 aa, Artificial Sequence
  Cyclic GFR-binding peptide
AAAAAANSSDDFYLVSIANMKEPVNSSDD

SEQ ID NO: 6132 - protein, 27 aa, Artificial Sequence
  Cyclic GFR-binding peptide
GGGGNSSDDFYLVSIANLKTPVNSSDD

SEQ ID NO: 6133 - protein, 29 aa, Artificial Sequence
  Cyclic GFR-binding peptide
GGGGGGNSSDDFYLVSIANMKTPTNSSDD

SEQ ID NO: 6134 - protein, 27 aa, Artificial Sequence
  Cyclic GFR-binding peptide
AAAANNSSDFYLVSIANLRAPVNNSSD

SEQ ID NO: 6135 - protein, 29 aa, Artificial Sequence
  Cyclic GFR-binding peptide
AAAAAAVGMDDFYLVSIANLRTPVVGMDD

SEQ ID NO: 6136 - protein, 27 aa, Artificial Sequence
  Cyclic GFR-binding peptide
GGGGVVGKDFYLVSIANTKVPAVVGKD

SEQ ID NO: 6137 - protein, 29 aa, Artificial Sequence
  Cyclic GFR-binding peptide
GGGGGGQQKDNFYLVSIANLAQPVQQKDN

SEQ ID NO: 6138 - protein, 27 aa, Artificial Sequence
  Cyclic GFR-binding peptide
AAAANNAADFYLVSIANLDQSVNNAAD

SEQ ID NO: 6139 - protein, 29 aa, Artificial Sequence
  Cyclic GFR-binding peptide
AAAAAANNASDFYLVSIANLDQPVNNASD

SEQ ID NO: 6140 - protein, 27 aa, Artificial Sequence
  Cyclic GFR-binding peptide
GGGGNSSDDFYLVSIANEETPVNSSDD

SEQ ID NO: 6141 - protein, 29 aa, Artificial Sequence
  Cyclic GFR-binding peptide
GGGGGGVRGNDFYLVSIANQGTPVVRGND

SEQ ID NO: 6142 - protein, 27 aa, Artificial Sequence
  Cyclic GFR-binding peptide
AAAAPKRGVFYLVSIANHHVRSPKRGV

SEQ ID NO: 6143 - protein, 29 aa, Artificial Sequence
  Cyclic GFR-binding peptide
AAAAAAPTKGIFYLVSIANLQVQTPTKGI

SEQ ID NO: 6144 - protein, 27 aa, Artificial Sequence
  Cyclic GFR-binding peptide
GGGGPTRGVYYLVSTASLETPAPTRGV

SEQ ID NO: 6145 - protein, 29 aa, Artificial Sequence
  Cyclic GFR-binding peptide
GGGGGGHPKIRYYLVSTASMKTPAHPKIR

SEQ ID NO: 6146 - protein, 27 aa, Artificial Sequence
  Cyclic GFR-binding peptide
AAAAHPKIRYYLVSTASLKTPAHPKIR

SEQ ID NO: 6147 - protein, 29 aa, Artificial Sequence
  Cyclic GFR-binding peptide
AAAAAAHPKIRYYLVSTASLQTPAHPKIR

SEQ ID NO: 6148 - protein, 27 aa, Artificial Sequence
  Cyclic GFR-binding peptide
GGGGHPKIRYYLVSTASLRTPAHPKIR

SEQ ID NO: 6149 - protein, 29 aa, Artificial Sequence
  Cyclic GFR-binding peptide
GGGGGGKRVYEYYLVSTASTKTPAKRVYE

SEQ ID NO: 6150 - protein, 27 aa, Artificial Sequence
  Cyclic GFR-binding peptide
AAAAKRVIEYYLVSTASLATPAKRVIE

SEQ ID NO: 6151 - protein, 27 aa, Artificial Sequence
  Cyclic GFR-binding peptide
GGGGKENEDYYLVSTASLDTPAKENED

SEQ ID NO: 6152 - protein, 29 aa, Artificial Sequence
  Cyclic GFR-binding peptide
GGGGGGNKNEDYYLVSTASLETPVNKNED

SEQ ID NO: 6153 - protein, 27 aa, Artificial Sequence
  Cyclic GFR-binding peptide
AAAAKDYEDYYLVSTASMKEPVKDYED

SEQ ID NO: 6154 - protein, 29 aa, Artificial Sequence
  Cyclic GFR-binding peptide
AAAAAANSSDDYYLVSTASLKTPVNSSDD

SEQ ID NO: 6155 - protein, 27 aa, Artificial Sequence
  Cyclic GFR-binding peptide
GGGGNSSDDYYLVSTASMKTPTNSSDD

SEQ ID NO: 6156 - protein, 29 aa, Artificial Sequence
  Cyclic GFR-binding peptide
GGGGGGNSSDDYYLVSTASLRAPVNSSDD

SEQ ID NO: 6157 - protein, 27 aa, Artificial Sequence
  Cyclic GFR-binding peptide
AAAANNSSDYYLVSTASLRTPVNNSSD

SEQ ID NO: 6158 - protein, 29 aa, Artificial Sequence
  Cyclic GFR-binding peptide
AAAAAAVGMDDYYLVSTASTKVPAVGMDD

SEQ ID NO: 6159 - protein, 27 aa, Artificial Sequence
  Cyclic GFR-binding peptide
GGGGVVGKDYYLVSTASLAQPVVVGKD

SEQ ID NO: 6160 - protein, 29 aa, Artificial Sequence
  Cyclic GFR-binding peptide
GGGGGGQQKDNYYLVSTASLDQSVQQKDN

SEQ ID NO: 6161 - protein, 27 aa, Artificial Sequence
  Cyclic GFR-binding peptide
AAAANNAADYYLVSTASLDQPVNNAAD

SEQ ID NO: 6162 - protein, 29 aa, Artificial Sequence
  Cyclic GFR-binding peptide
AAAAAANNASDYYLVSTASEETPVNNASD

SEQ ID NO: 6163 - protein, 27 aa, Artificial Sequence
  Cyclic GFR-binding peptide
GGGGNSSDDYYLVSTASQGTPVNSSDD

SEQ ID NO: 6164 - protein, 29 aa, Artificial Sequence
  Cyclic GFR-binding peptide
GGGGGGVRGNDYYLVSTASHHVRSVRGND

SEQ ID NO: 6165 - protein, 27 aa, Artificial Sequence
  Cyclic GFR-binding peptide
AAAAPKRGVYYLVSTASLQVQTPKRGV

SEQ ID NO: 6166 - protein, 29 aa, Artificial Sequence
  Cyclic GFR-binding peptide
AAAAAAPTKGIKYLVSIPSLETPVPTKGI

SEQ ID NO: 6167 - protein, 27 aa, Artificial Sequence
  Cyclic GFR-binding peptide
GGGGPTRGVKYLVSIPSMKTPVPTRGV

SEQ ID NO: 6168 - protein, 29 aa, Artificial Sequence
  Cyclic GFR-binding peptide
GGGGGGHPKIRKYLVSIPSLKTPVHPKIR

SEQ ID NO: 6169 - protein, 27 aa, Artificial Sequence
  Cyclic GFR-binding peptide
AAAAHPKIRKYLVSIPSLQTPVHPKIR

SEQ ID NO: 6170 - protein, 29 aa, Artificial Sequence
  Cyclic GFR-binding peptide
AAAAAAHPKIRKYLVSIPSLRTPVHPKIR

SEQ ID NO: 6171 - protein, 27 aa, Artificial Sequence
  Cyclic GFR-binding peptide
GGGGHPKIRKYLVSIPSTKTPVHPKIR

SEQ ID NO: 6172 - protein, 29 aa, Artificial Sequence
  Cyclic GFR-binding peptide
GGGGGGKRVYEKYLVSIPSLATPVKRVYE

SEQ ID NO: 6173 - protein, 27 aa, Artificial Sequence
  Cyclic GFR-binding peptide
AAAAKRVIEKYLVSIPSLDTPVKRVIE

SEQ ID NO: 6174 - protein, 27 aa, Artificial Sequence
  Cyclic GFR-binding peptide
GGGGKENEDKYLVSIPSMKEPVKENED

SEQ ID NO: 6175 - protein, 29 aa, Artificial Sequence
  Cyclic GFR-binding peptide
GGGGGGNKNEDKYLVSIPSLKTPANKNED

SEQ ID NO: 6176 - protein, 27 aa, Artificial Sequence
  Cyclic GFR-binding peptide
AAAAKDYEDKYLVSIPSLQTPAKDYED

SEQ ID NO: 6177 - protein, 29 aa, Artificial Sequence
  Cyclic GFR-binding peptide
AAAAAANSSDDKYLVSIPSMKTPTNSSDD

SEQ ID NO: 6178 - protein, 27 aa, Artificial Sequence
  Cyclic GFR-binding peptide
GGGGNSSDDKYLVSIPSLRAPVNSSDD

SEQ ID NO: 6179 - protein, 29 aa, Artificial Sequence
  Cyclic GFR-binding peptide
GGGGGGNSSDDKYLVSIPSTKVPANSSDD

SEQ ID NO: 6180 - protein, 27 aa, Artificial Sequence
  Cyclic GFR-binding peptide
AAAANNSSDKYLVSIPSLAQPVNNSSD

SEQ ID NO: 6181 - protein, 29 aa, Artificial Sequence
  Cyclic GFR-binding peptide
AAAAAAVGMDDKYLVSIPSLDQSVVGMDD

SEQ ID NO: 6182 - protein, 27 aa, Artificial Sequence
  Cyclic GFR-binding peptide
GGGGVVGKDKYLVSIPSLDQPVVVGKD

SEQ ID NO: 6183 - protein, 29 aa, Artificial Sequence
  Cyclic GFR-binding peptide
GGGGGGQQKDNKYLVSIPSHHVRSQQKDN

SEQ ID NO: 6184 - protein, 27 aa, Artificial Sequence
  Cyclic GFR-binding peptide
AAAANNAADKYLVSIPSLQVQTNNAAD

SEQ ID NO: 6185 - protein, 29 aa, Artificial Sequence
  Cyclic GFR-binding peptide
AAAAAANNASDLYLISIPELETPVNNASD

SEQ ID NO: 6186 - protein, 27 aa, Artificial Sequence
  Cyclic GFR-binding peptide
GGGGNSSDDLYLISIPEMKTPVNSSDD

SEQ ID NO: 6187 - protein, 29 aa, Artificial Sequence
  Cyclic GFR-binding peptide
GGGGGGVRGNDLYLISIPELKTPVVRGND

SEQ ID NO: 6188 - protein, 27 aa, Artificial Sequence
  Cyclic GFR-binding peptide
AAAAPKRGVLYLISIPELQTPVPKRGV

SEQ ID NO: 6189 - protein, 29 aa, Artificial Sequence
  Cyclic GFR-binding peptide
AAAAAAPTKGILYLISIPELRTPVPTKGI

SEQ ID NO: 6190 - protein, 27 aa, Artificial Sequence
  Cyclic GFR-binding peptide
GGGGPTRGVLYLISIPETKTPVPTRGV

SEQ ID NO: 6191 - protein, 29 aa, Artificial Sequence
  Cyclic GFR-binding peptide
GGGGGGHPKIRLYLISIPELATPVHPKIR

SEQ ID NO: 6192 - protein, 27 aa, Artificial Sequence
  Cyclic GFR-binding peptide
AAAAHPKIRLYLISIPELDTPVHPKIR

SEQ ID NO: 6193 - protein, 29 aa, Artificial Sequence
  Cyclic GFR-binding peptide
AAAAAAHPKIRLYLISIPEMKEPVHPKIR

SEQ ID NO: 6194 - protein, 27 aa, Artificial Sequence
  Cyclic GFR-binding peptide
GGGGHPKIRLYLISIPELKTPAHPKIR

SEQ ID NO: 6195 - protein, 29 aa, Artificial Sequence
  Cyclic GFR-binding peptide
GGGGGGKRVYELYLISIPELQTPAKRVYE

SEQ ID NO: 6196 - protein, 27 aa, Artificial Sequence
  Cyclic GFR-binding peptide
AAAAKRVIELYLISIPEMKTPTKRVIE

SEQ ID NO: 6197 - protein, 27 aa, Artificial Sequence
  Cyclic GFR-binding peptide
GGGGKENEDLYLISIPELRAPVKENED

SEQ ID NO: 6198 - protein, 29 aa, Artificial Sequence
  Cyclic GFR-binding peptide
GGGGGGNKNEDLYLISIPETKVPANKNED

SEQ ID NO: 6199 - protein, 27 aa, Artificial Sequence
  Cyclic GFR-binding peptide
AAAAKDYEDLYLISIPELAQPVKDYED

SEQ ID NO: 6200 - protein, 29 aa, Artificial Sequence
  Cyclic GFR-binding peptide
AAAAAANSSDDLYLISIPELDQSVNSSDD

SEQ ID NO: 6201 - protein, 27 aa, Artificial Sequence
  Cyclic GFR-binding peptide
GGGGNSSDDLYLISIPELDQPVNSSDD

SEQ ID NO: 6202 - protein, 29 aa, Artificial Sequence
  Cyclic GFR-binding peptide
GGGGGGNSSDDLYLISIPEHHVRSNSSDD

SEQ ID NO: 6203 - protein, 27 aa, Artificial Sequence
  Cyclic GFR-binding peptide
AAAANNSSDLYLISIPELQVQTNNSSD

SEQ ID NO: 6204 - protein, 29 aa, Artificial Sequence
  Cyclic GFR-binding peptide
AAAAAAVGMDDFYLMNIPSLETPTVGMDD

SEQ ID NO: 6205 - protein, 27 aa, Artificial Sequence
  Cyclic GFR-binding peptide
GGGGVVGKDFYLMNIPSMKTPTVVGKD

SEQ ID NO: 6206 - protein, 29 aa, Artificial Sequence
  Cyclic GFR-binding peptide
GGGGGGQQKDNFYLMNIPSLKTPTQQKDN

SEQ ID NO: 6207 - protein, 27 aa, Artificial Sequence
  Cyclic GFR-binding peptide
AAAANNAADFYLMNIPSLQTPTNNAAD

SEQ ID NO: 6208 - protein, 29 aa, Artificial Sequence
  Cyclic GFR-binding peptide
AAAAAANNASDFYLMNIPSLRTPTNNASD

SEQ ID NO: 6209 - protein, 27 aa, Artificial Sequence
  Cyclic GFR-binding peptide
GGGGNSSDDFYLMNIPSTKTPTNSSDD

SEQ ID NO: 6210 - protein, 29 aa, Artificial Sequence
  Cyclic GFR-binding peptide
GGGGGGVRGNDFYLMNIPSLATPTVRGND

SEQ ID NO: 6211 - protein, 27 aa, Artificial Sequence
  Cyclic GFR-binding peptide
AAAAPKRGVFYLMNIPSLDTPTPKRGV

SEQ ID NO: 6212 - protein, 29 aa, Artificial Sequence
  Cyclic GFR-binding peptide
AAAAAAPTKGIFYLMNIPSLETPVPTKGI

SEQ ID NO: 6213 - protein, 27 aa, Artificial Sequence
  Cyclic GFR-binding peptide
GGGGPTRGVFYLMNIPSMKEPVPTRGV

SEQ ID NO: 6214 - protein, 29 aa, Artificial Sequence
  Cyclic GFR-binding peptide
GGGGGGHPKIRFYLMNIPSLKTPAHPKIR

SEQ ID NO: 6215 - protein, 27 aa, Artificial Sequence
  Cyclic GFR-binding peptide
AAAAHPKIRFYLMNIPSLQTPAHPKIR

SEQ ID NO: 6216 - protein, 29 aa, Artificial Sequence
  Cyclic GFR-binding peptide
AAAAAAHPKIRFYLMNIPSLKTPVHPKIR

SEQ ID NO: 6217 - protein, 27 aa, Artificial Sequence
  Cyclic GFR-binding peptide
GGGGHPKIRFYLMNIPSLRAPVHPKIR

SEQ ID NO: 6218 - protein, 29 aa, Artificial Sequence
  Cyclic GFR-binding peptide
GGGGGGKRVYEFYLMNIPSLRTPVKRVYE

SEQ ID NO: 6219 - protein, 27 aa, Artificial Sequence
  Cyclic GFR-binding peptide
AAAAKRVIEFYLMNIPSTKVPAKRVIE

SEQ ID NO: 6220 - protein, 27 aa, Artificial Sequence
  Cyclic GFR-binding peptide
GGGGKENEDFYLMNIPSLAQPVKENED

SEQ ID NO: 6221 - protein, 29 aa, Artificial Sequence
  Cyclic GFR-binding peptide
GGGGGGNKNEDFYLMNIPSLDQSVNKNED

SEQ ID NO: 6222 - protein, 27 aa, Artificial Sequence
  Cyclic GFR-binding peptide
AAAAKDYEDFYLMNIPSLDQPVKDYED

SEQ ID NO: 6223 - protein, 29 aa, Artificial Sequence
  Cyclic GFR-binding peptide
AAAAAANSSDDFYLMNIPSEETPVNSSDD

SEQ ID NO: 6224 - protein, 27 aa, Artificial Sequence
  Cyclic GFR-binding peptide
GGGGNSSDDFYLMNIPSQGTPVNSSDD

SEQ ID NO: 6225 - protein, 29 aa, Artificial Sequence
  Cyclic GFR-binding peptide
GGGGGGNSSDDFYLMNIPSHHVRSNSSDD

SEQ ID NO: 6226 - protein, 27 aa, Artificial Sequence
  Cyclic GFR-binding peptide
AAAANNSSDFYLMNIPSLQVQTNNSSD

SEQ ID NO: 6227 - protein, 29 aa, Artificial Sequence
  Cyclic GFR-binding peptide
AAAAAAVGMDDIYLISIPSLEAPVVGMDD

SEQ ID NO: 6228 - protein, 27 aa, Artificial Sequence
  Cyclic GFR-binding peptide
GGGGVVGKDIYLISIPSMKAPVVVGKD

SEQ ID NO: 6229 - protein, 29 aa, Artificial Sequence
  Cyclic GFR-binding peptide
GGGGGGQQKDNIYLISIPSLKAPVQQKDN

SEQ ID NO: 6230 - protein, 27 aa, Artificial Sequence
  Cyclic GFR-binding peptide
AAAANNAADIYLISIPSLQAPVNNAAD

SEQ ID NO: 6231 - protein, 29 aa, Artificial Sequence
  Cyclic GFR-binding peptide
AAAAAANNASDIYLISIPSLRAPVNNASD

SEQ ID NO: 6232 - protein, 27 aa, Artificial Sequence
  Cyclic GFR-binding peptide
GGGGNSSDDIYLISIPSTKAPVNSSDD

SEQ ID NO: 6233 - protein, 29 aa, Artificial Sequence
  Cyclic GFR-binding peptide
GGGGGGVRGNDIYLISIPSLAAPVVRGND

SEQ ID NO: 6234 - protein, 27 aa, Artificial Sequence
  Cyclic GFR-binding peptide
AAAAPKRGVIYLISIPSLDAPVPKRGV

SEQ ID NO: 6235 - protein, 29 aa, Artificial Sequence
  Cyclic GFR-binding peptide
AAAAAAPTKGIIYLISIPSLETPVPTKGI

SEQ ID NO: 6236 - protein, 27 aa, Artificial Sequence
  Cyclic GFR-binding peptide
GGGGPTRGVIYLISIPSMKEPVPTRGV

SEQ ID NO: 6237 - protein, 29 aa, Artificial Sequence
  Cyclic GFR-binding peptide
GGGGGGHPKIRIYLISIPSLKTPAHPKIR

SEQ ID NO: 6238 - protein, 27 aa, Artificial Sequence
  Cyclic GFR-binding peptide
AAAAHPKIRIYLISIPSLQTPAHPKIR

SEQ ID NO: 6239 - protein, 29 aa, Artificial Sequence
  Cyclic GFR-binding peptide
AAAAAAHPKIRIYLISIPSLKTPVHPKIR

SEQ ID NO: 6240 - protein, 27 aa, Artificial Sequence
  Cyclic GFR-binding peptide
GGGGHPKIRIYLISIPSMKTPTHPKIR

SEQ ID NO: 6241 - protein, 29 aa, Artificial Sequence
  Cyclic GFR-binding peptide
GGGGGGKRVYEIYLISIPSLRTPVKRVYE

SEQ ID NO: 6242 - protein, 27 aa, Artificial Sequence
  Cyclic GFR-binding peptide
AAAAKRVIEIYLISIPSTKVPAKRVIE

SEQ ID NO: 6243 - protein, 27 aa, Artificial Sequence
  Cyclic GFR-binding peptide
GGGGKENEDIYLISIPSLAQPVKENED

SEQ ID NO: 6244 - protein, 29 aa, Artificial Sequence
  Cyclic GFR-binding peptide
GGGGGGNKNEDIYLISIPSLDQSVNKNED

SEQ ID NO: 6245 - protein, 27 aa, Artificial Sequence
  Cyclic GFR-binding peptide
AAAAKDYEDIYLISIPSLDQPVKDYED

SEQ ID NO: 6246 - protein, 29 aa, Artificial Sequence
  Cyclic GFR-binding peptide
AAAAAANSSDDIYLISIPSEETPVNSSDD

SEQ ID NO: 6247 - protein, 27 aa, Artificial Sequence
  Cyclic GFR-binding peptide
GGGGNSSDDIYLISIPSQGTPVNSSDD

SEQ ID NO: 6248 - protein, 29 aa, Artificial Sequence
  Cyclic GFR-binding peptide
GGGGGGNSSDDIYLISIPSHHVRSNSSDD

SEQ ID NO: 6249 - protein, 27 aa, Artificial Sequence
  Cyclic GFR-binding peptide
AAAANNSSDIYLISIPSLQVQTNNSSD

SEQ ID NO: 6250 - protein, 29 aa, Artificial Sequence
  Cyclic GFR-binding peptide
AAAAAAVGMDDIFLISIPSLETPVVGMDD

SEQ ID NO: 6251 - protein, 27 aa, Artificial Sequence
  Cyclic GFR-binding peptide
GGGGVVGKDIFLISIPSMKTPVVVGKD

SEQ ID NO: 6252 - protein, 29 aa, Artificial Sequence
  Cyclic GFR-binding peptide
GGGGGGQQKDNIFLISIPSLKTPVQQKDN

SEQ ID NO: 6253 - protein, 27 aa, Artificial Sequence
  Cyclic GFR-binding peptide
AAAANNAADIFLISIPSLQTPVNNAAD

SEQ ID NO: 6254 - protein, 29 aa, Artificial Sequence
  Cyclic GFR-binding peptide
AAAAAANNASDIFLISIPSLRTPVNNASD

SEQ ID NO: 6255 - protein, 27 aa, Artificial Sequence
  Cyclic GFR-binding peptide
GGGGNSSDDIFLISIPSTKTPVNSSDD

SEQ ID NO: 6256 - protein, 29 aa, Artificial Sequence
  Cyclic GFR-binding peptide
GGGGGGVRGNDIFLISIPSLATPVVRGND

SEQ ID NO: 6257 - protein, 27 aa, Artificial Sequence
  Cyclic GFR-binding peptide
AAAAPKRGVIFLISIPSLDTPVPKRGV

SEQ ID NO: 6258 - protein, 29 aa, Artificial Sequence
  Cyclic GFR-binding peptide
AAAAAAPTKGIIFLISIPSMKEPVPTKGI

SEQ ID NO: 6259 - protein, 27 aa, Artificial Sequence
  Cyclic GFR-binding peptide
GGGGPTRGVIFLISIPSLKTPAPTRGV

SEQ ID NO: 6260 - protein, 29 aa, Artificial Sequence
  Cyclic GFR-binding peptide
GGGGGGHPKIRIFLISIPSLQTPAHPKIR

SEQ ID NO: 6261 - protein, 27 aa, Artificial Sequence
  Cyclic GFR-binding peptide
AAAAHPKIRIFLISIPSMKTPTHPKIR

SEQ ID NO: 6262 - protein, 29 aa, Artificial Sequence
  Cyclic GFR-binding peptide
AAAAAAHPKIRIFLISIPSLRAPVHPKIR

SEQ ID NO: 6263 - protein, 27 aa, Artificial Sequence
  Cyclic GFR-binding peptide
GGGGHPKIRIFLISIPSTKVPAHPKIR

SEQ ID NO: 6264 - protein, 29 aa, Artificial Sequence
  Cyclic GFR-binding peptide
GGGGGGKRVYEIFLISIPSLAQPVKRVYE

SEQ ID NO: 6265 - protein, 27 aa, Artificial Sequence
  Cyclic GFR-binding peptide
AAAAKRVIEIFLISIPSLDQSVKRVIE

SEQ ID NO: 6266 - protein, 27 aa, Artificial Sequence
  Cyclic GFR-binding peptide
GGGGKENEDIFLISIPSLDQPVKENED

SEQ ID NO: 6267 - protein, 29 aa, Artificial Sequence
  Cyclic GFR-binding peptide
GGGGGGNKNEDIFLISIPSHHVRSNKNED

SEQ ID NO: 6268 - protein, 27 aa, Artificial Sequence
  Cyclic GFR-binding peptide
AAAAKDYEDIFLISIPSLQVQTKDYED

SEQ ID NO: 6269 - protein, 29 aa, Artificial Sequence
  Cyclic GFR-binding peptide
AAAAAANSSDDVYLMSLPKLEVPANSSDD

SEQ ID NO: 6270 - protein, 27 aa, Artificial Sequence
  Cyclic GFR-binding peptide
GGGGNSSDDVYLMSLPKMKVPANSSDD

SEQ ID NO: 6271 - protein, 29 aa, Artificial Sequence
  Cyclic GFR-binding peptide
GGGGGGNSSDDVYLMSLPKLKVPANSSDD

SEQ ID NO: 6272 - protein, 27 aa, Artificial Sequence
  Cyclic GFR-binding peptide
AAAANNSSDVYLMSLPKLQVPANNSSD

SEQ ID NO: 6273 - protein, 29 aa, Artificial Sequence
  Cyclic GFR-binding peptide
AAAAAAVGMDDVYLMSLPKLRVPAVGMDD

SEQ ID NO: 6274 - protein, 27 aa, Artificial Sequence
  Cyclic GFR-binding peptide
GGGGVVGKDVYLMSLPKLAVPAVVGKD

SEQ ID NO: 6275 - protein, 29 aa, Artificial Sequence
  Cyclic GFR-binding peptide
GGGGGGQQKDNVYLMSLPKLDVPAQQKDN

SEQ ID NO: 6276 - protein, 27 aa, Artificial Sequence
  Cyclic GFR-binding peptide
AAAANNAADVYLMSLPKLETPVNNAAD

SEQ ID NO: 6277 - protein, 29 aa, Artificial Sequence
  Cyclic GFR-binding peptide
AAAAAANNASDVYLMSLPKMKEPVNNASD

SEQ ID NO: 6278 - protein, 27 aa, Artificial Sequence
  Cyclic GFR-binding peptide
GGGGNSSDDVYLMSLPKLKTPANSSDD

SEQ ID NO: 6279 - protein, 29 aa, Artificial Sequence
  Cyclic GFR-binding peptide
GGGGGGVRGNDVYLMSLPKLQTPAVRGND

SEQ ID NO: 6280 - protein, 27 aa, Artificial Sequence
  Cyclic GFR-binding peptide
AAAAPKRGVVYLMSLPKLKTPVPKRGV

SEQ ID NO: 6281 - protein, 29 aa, Artificial Sequence
  Cyclic GFR-binding peptide
AAAAAAPTKGIVYLMSLPKMKTPTPTKGI

SEQ ID NO: 6282 - protein, 27 aa, Artificial Sequence
  Cyclic GFR-binding peptide
GGGGPTRGVVYLMSLPKLRAPVKENED

SEQ ID NO: 6283 - protein, 29 aa, Artificial Sequence
  Cyclic GFR-binding peptide
GGGGGGHPKIRVYLMSLPKLRTPVNKNED

SEQ ID NO: 6284 - protein, 27 aa, Artificial Sequence
  Cyclic GFR-binding peptide
AAAAHPKIRVYLMSLPKLAQPVKDYED

SEQ ID NO: 6285 - protein, 29 aa, Artificial Sequence
  Cyclic GFR-binding peptide
AAAAAAHPKIRVYLMSLPKLDQSVNSSDD

SEQ ID NO: 6286 - protein, 27 aa, Artificial Sequence
  Cyclic GFR-binding peptide
GGGGHPKIRVYLMSLPKLDQPVNSSDD

SEQ ID NO: 6287 - protein, 29 aa, Artificial Sequence
  Cyclic GFR-binding peptide
GGGGGGKRVYEVYLMSLPKEETPVNSSDD

SEQ ID NO: 6288 - protein, 27 aa, Artificial Sequence
  Cyclic GFR-binding peptide
AAAAKRVIEVYLMSLPKQGTPVNNSSD

SEQ ID NO: 6289 - protein, 27 aa, Artificial Sequence
  Cyclic GFR-binding peptide
GGGGKENEDVYLMSLPKHHVRSVGMDD

SEQ ID NO: 6290 - protein, 29 aa, Artificial Sequence
  Cyclic GFR-binding peptide
GGGGGGNKNEDVYLMSLPKLQVQTVVGKD

SEQ ID NO: 6291 - protein, 27 aa, Artificial Sequence
  Cyclic GFR-binding peptide
AAAAKDYEDYYVIPLPELEQPVQQKDN

SEQ ID NO: 6292 - protein, 29 aa, Artificial Sequence
  Cyclic GFR-binding peptide
AAAAAANSSDDYYVIPLPEMKQPVNNAAD

SEQ ID NO: 6293 - protein, 27 aa, Artificial Sequence
  Cyclic GFR-binding peptide
GGGGNSSDDYYVIPLPELKQPVNNASD

SEQ ID NO: 6294 - protein, 29 aa, Artificial Sequence
  Cyclic GFR-binding peptide
GGGGGGNSSDDYYVIPLPELQQPVNSSDD

SEQ ID NO: 6295 - protein, 27 aa, Artificial Sequence
  Cyclic GFR-binding peptide
AAAANNSSDYYVIPLPELRQPVVRGND

SEQ ID NO: 6296 - protein, 29 aa, Artificial Sequence
  Cyclic GFR-binding peptide
AAAAAAVGMDDYYVIPLPETKQPVPKRGV

SEQ ID NO: 6297 - protein, 27 aa, Artificial Sequence
  Cyclic GFR-binding peptide
GGGGVVGKDYYVIPLPELDQPVPTKGI

SEQ ID NO: 6298 - protein, 29 aa, Artificial Sequence
  Cyclic GFR-binding peptide
GGGGGGQQKDNYYVIPLPELETPVPTRGV

SEQ ID NO: 6299 - protein, 27 aa, Artificial Sequence
  Cyclic GFR-binding peptide
AAAANNAADYYVIPLPEMKEPVHPKIR

SEQ ID NO: 6300 - protein, 29 aa, Artificial Sequence
  Cyclic GFR-binding peptide
AAAAAANNASDYYVIPLPELKTPAHPKIR

SEQ ID NO: 6301 - protein, 27 aa, Artificial Sequence
  Cyclic GFR-binding peptide
GGGGNSSDDYYVIPLPELQTPAHPKIR

SEQ ID NO: 6302 - protein, 29 aa, Artificial Sequence
  Cyclic GFR-binding peptide
GGGGGGVRGNDYYVIPLPELKTPVHPKIR

SEQ ID NO: 6303 - protein, 27 aa, Artificial Sequence
  Cyclic GFR-binding peptide
AAAAPKRGVYYVIPLPEMKTPTKRVYE

SEQ ID NO: 6304 - protein, 29 aa, Artificial Sequence
  Cyclic GFR-binding peptide
AAAAAAPTKGIYYVIPLPELRAPVKRVIE

SEQ ID NO: 6305 - protein, 27 aa, Artificial Sequence
  Cyclic GFR-binding peptide
GGGGPTRGVYYVIPLPELRTPVKENED

SEQ ID NO: 6306 - protein, 29 aa, Artificial Sequence
  Cyclic GFR-binding peptide
GGGGGGHPKIRYYVIPLPETKVPANKNED

SEQ ID NO: 6307 - protein, 27 aa, Artificial Sequence
  Cyclic GFR-binding peptide
AAAAHPKIRYYVIPLPELDQSVKDYED

SEQ ID NO: 6308 - protein, 29 aa, Artificial Sequence
  Cyclic GFR-binding peptide
AAAAAAHPKIRYYVIPLPEEETPVNSSDD

SEQ ID NO: 6309 - protein, 27 aa, Artificial Sequence
  Cyclic GFR-binding peptide
GGGGHPKIRYYVIPLPEQGTPVNSSDD

SEQ ID NO: 6310 - protein, 29 aa, Artificial Sequence
  Cyclic GFR-binding peptide
GGGGGGKRVYEYYVIPLPEHHVRSNSSDD

SEQ ID NO: 6311 - protein, 27 aa, Artificial Sequence
  Cyclic GFR-binding peptide
AAAAKRVIEYYVIPLPELQVQTNNSSD

SEQ ID NO: 6312 - protein, 27 aa, Artificial Sequence
  Cyclic GFR-binding peptide
GGGGKENEDYYLITLPELEQSVVGMDD

SEQ ID NO: 6313 - protein, 29 aa, Artificial Sequence
  Cyclic GFR-binding peptide
GGGGGGNKNEDYYLITLPEMKQSVVVGKD

SEQ ID NO: 6314 - protein, 27 aa, Artificial Sequence
  Cyclic GFR-binding peptide
AAAAKDYEDYYLITLPELKQSVQQKDN

SEQ ID NO: 6315 - protein, 29 aa, Artificial Sequence
  Cyclic GFR-binding peptide
AAAAAANSSDDYYLITLPELQQSVNNAAD

SEQ ID NO: 6316 - protein, 27 aa, Artificial Sequence
  Cyclic GFR-binding peptide
GGGGNSSDDYYLITLPELRQSVNNASD

SEQ ID NO: 6317 - protein, 29 aa, Artificial Sequence
  Cyclic GFR-binding peptide
GGGGGGNSSDDYYLITLPETKQSVNSSDD

SEQ ID NO: 6318 - protein, 27 aa, Artificial Sequence
  Cyclic GFR-binding peptide
AAAANNSSDYYLITLPELAQSVVRGND

SEQ ID NO: 6319 - protein, 29 aa, Artificial Sequence
  Cyclic GFR-binding peptide
AAAAAAVGMDDYYLITLPELDQSVPKRGV

SEQ ID NO: 6320 - protein, 27 aa, Artificial Sequence
  Cyclic GFR-binding peptide
GGGGVVGKDYYLITLPELETPVPTKGI

SEQ ID NO: 6321 - protein, 29 aa, Artificial Sequence
  Cyclic GFR-binding peptide
GGGGGGQQKDNYYLITLPEMKEPVPTRGV

SEQ ID NO: 6322 - protein, 27 aa, Artificial Sequence
  Cyclic GFR-binding peptide
AAAANNAADYYLITLPELKTPAHPKIR

SEQ ID NO: 6323 - protein, 29 aa, Artificial Sequence
  Cyclic GFR-binding peptide
AAAAAANNASDYYLITLPELQTPAHPKIR

SEQ ID NO: 6324 - protein, 27 aa, Artificial Sequence
  Cyclic GFR-binding peptide
GGGGNSSDDYYLITLPELKTPVHPKIR

SEQ ID NO: 6325 - protein, 29 aa, Artificial Sequence
  Cyclic GFR-binding peptide
GGGGGGVRGNDYYLITLPEMKTPTHPKIR

SEQ ID NO: 6326 - protein, 27 aa, Artificial Sequence
  Cyclic GFR-binding peptide
AAAAPKRGVYYLITLPELRAPVKRVYE

SEQ ID NO: 6327 - protein, 29 aa, Artificial Sequence
  Cyclic GFR-binding peptide
AAAAAAPTKGIYYLITLPELRTPVKRVIE

SEQ ID NO: 6328 - protein, 27 aa, Artificial Sequence
  Cyclic GFR-binding peptide
GGGGPTRGVYYLITLPETKVPAKENED

SEQ ID NO: 6329 - protein, 29 aa, Artificial Sequence
  Cyclic GFR-binding peptide
GGGGGGHPKIRYYLITLPELAQPVNKNED

SEQ ID NO: 6330 - protein, 27 aa, Artificial Sequence
  Cyclic GFR-binding peptide
AAAAHPKIRYYLITLPEEETPVKDYED

SEQ ID NO: 6331 - protein, 29 aa, Artificial Sequence
  Cyclic GFR-binding peptide
AAAAAAHPKIRYYLITLPEQGTPVNSSDD

SEQ ID NO: 6332 - protein, 27 aa, Artificial Sequence
  Cyclic GFR-binding peptide
GGGGHPKIRYYLITLPEHHVRSNSSDD

SEQ ID NO: 6333 - protein, 29 aa, Artificial Sequence
  Cyclic GFR-binding peptide
GGGGGGKRVYEYYLITLPELQVQTNSSDD

SEQ ID NO: 6334 - protein, 27 aa, Artificial Sequence
  Cyclic GFR-binding peptide
AAAAKRVIEYYLITLPELEQPVNNSSD

SEQ ID NO: 6335 - protein, 27 aa, Artificial Sequence
  Cyclic GFR-binding peptide
GGGGKENEDYYLITLPEMKQPVVGMDD

SEQ ID NO: 6336 - protein, 29 aa, Artificial Sequence
  Cyclic GFR-binding peptide
GGGGGGNKNEDYYLITLPELKQPVVVGKD

SEQ ID NO: 6337 - protein, 27 aa, Artificial Sequence
  Cyclic GFR-binding peptide
AAAAKDYEDYYLITLPELQQPVQQKDN

SEQ ID NO: 6338 - protein, 29 aa, Artificial Sequence
  Cyclic GFR-binding peptide
AAAAAANSSDDYYLITLPELRQPVNNAAD

SEQ ID NO: 6339 - protein, 27 aa, Artificial Sequence
  Cyclic GFR-binding peptide
GGGGNSSDDYYLITLPETKQPVNNASD

SEQ ID NO: 6340 - protein, 29 aa, Artificial Sequence
  Cyclic GFR-binding peptide
GGGGGGNSSDDYYLITLPELDQPVNSSDD

SEQ ID NO: 6341 - protein, 27 aa, Artificial Sequence
  Cyclic GFR-binding peptide
AAAANNSSDMIQMTINSQGTPVVRGND

SEQ ID NO: 6342 - protein, 29 aa, Artificial Sequence
  Cyclic GFR-binding peptide
AAAAAAVGMDDMIQMTINSMKEPVPKRGV

SEQ ID NO: 6343 - protein, 27 aa, Artificial Sequence
  Cyclic GFR-binding peptide
GGGGVVGKDMIQMTINSLKTPAPTKGI

SEQ ID NO: 6344 - protein, 29 aa, Artificial Sequence
  Cyclic GFR-binding peptide
GGGGGGQQKDNMIQMTINSLQTPAPTRGV

SEQ ID NO: 6345 - protein, 27 aa, Artificial Sequence
  Cyclic GFR-binding peptide
AAAANNAADMIQMTINSMKTPTHPKIR

SEQ ID NO: 6346 - protein, 29 aa, Artificial Sequence
  Cyclic GFR-binding peptide
AAAAAANNASDMIQMTINSLRAPVHPKIR

SEQ ID NO: 6347 - protein, 27 aa, Artificial Sequence
  Cyclic GFR-binding peptide
GGGGNSSDDMIQMTINSTKVPAHPKIR

SEQ ID NO: 6348 - protein, 29 aa, Artificial Sequence
  Cyclic GFR-binding peptide
GGGGGGVRGNDMIQMTINSLAQPVHPKIR

SEQ ID NO: 6349 - protein, 27 aa, Artificial Sequence
  Cyclic GFR-binding peptide
AAAAPKRGVMIQMTINSLDQSVKRVYE

SEQ ID NO: 6350 - protein, 29 aa, Artificial Sequence
  Cyclic GFR-binding peptide
AAAAAAPTKGIMIQMTINSLDQPVKRVIE

SEQ ID NO: 6351 - protein, 27 aa, Artificial Sequence
  Cyclic GFR-binding peptide
GGGGPTRGVMIQMTINSHHVRSKENED

SEQ ID NO: 6352 - protein, 29 aa, Artificial Sequence
  Cyclic GFR-binding peptide
GGGGGGHPKIRMIQMTINSLQVQTNKNED

SEQ ID NO: 6353 - protein, 27 aa, Artificial Sequence
  Cyclic GFR-binding peptide
AAAAHPKIRVKAVKVSRLQVRSKDYED

SEQ ID NO: 6354 - protein, 29 aa, Artificial Sequence
  Cyclic GFR-binding peptide
AAAAAAHPKIRVKAVKVSRLETPVNSSDD

SEQ ID NO: 6355 - protein, 27 aa, Artificial Sequence
  Cyclic GFR-binding peptide
GGGGHPKIRVKAVKVSRMKEPVNSSDD

SEQ ID NO: 6356 - protein, 29 aa, Artificial Sequence
  Cyclic GFR-binding peptide
GGGGGGKRVYEVKAVKVSRLKTPANSSDD

SEQ ID NO: 6357 - protein, 27 aa, Artificial Sequence
  Cyclic GFR-binding peptide
AAAAKRVIEVKAVKVSRLQTPANNSSD

SEQ ID NO: 6358 - protein, 27 aa, Artificial Sequence
  Cyclic GFR-binding peptide
GGGGKENEDVKAVKVSRLKTPVVGMDD

SEQ ID NO: 6359 - protein, 29 aa, Artificial Sequence
  Cyclic GFR-binding peptide
GGGGGGNKNEDVKAVKVSRMKTPTVVGKD

SEQ ID NO: 6360 - protein, 27 aa, Artificial Sequence
  Cyclic GFR-binding peptide
AAAAKDYEDVKAVKVSRLRAPVQQKDN

SEQ ID NO: 6361 - protein, 29 aa, Artificial Sequence
  Cyclic GFR-binding peptide
AAAAAANSSDDVKAVKVSRLRTPVNNAAD

SEQ ID NO: 6362 - protein, 27 aa, Artificial Sequence
  Cyclic GFR-binding peptide
GGGGNSSDDVKAVKVSRTKVPANNASD

SEQ ID NO: 6363 - protein, 29 aa, Artificial Sequence
  Cyclic GFR-binding peptide
GGGGGGNSSDDVKAVKVSRLAQPVNSSDD

SEQ ID NO: 6364 - protein, 27 aa, Artificial Sequence
  Cyclic GFR-binding peptide
AAAANNSSDVKAVKVSRLDQSVVRGND

SEQ ID NO: 6365 - protein, 29 aa, Artificial Sequence
  Cyclic GFR-binding peptide
AAAAAAVGMDDVKAVKVSRLDQPVPKRGV

SEQ ID NO: 6366 - protein, 27 aa, Artificial Sequence
  Cyclic GFR-binding peptide
GGGGVVGKDVKAVKVSREETPVPTKGI

SEQ ID NO: 6367 - protein, 29 aa, Artificial Sequence
  Cyclic GFR-binding peptide
GGGGGGQQKDNVKAVKVSRQGTPVPTRGV

SEQ ID NO: 6368 - protein, 27 aa, Artificial Sequence
  Cyclic GFR-binding peptide
AAAANNAADVKAVKVSRLQVQTHPKIR

SEQ ID NO: 6369 - protein, 29 aa, Artificial Sequence
  Cyclic GFR-binding peptide
AAAAAANNASDIKRVQVPRHHVQTHPKIR

SEQ ID NO: 6370 - protein, 27 aa, Artificial Sequence
  Cyclic GFR-binding peptide
GGGGNSSDDIKRVQVPRLETPVHPKIR

SEQ ID NO: 6371 - protein, 29 aa, Artificial Sequence
  Cyclic GFR-binding peptide
GGGGGGVRGNDIKRVQVPRMKEPVHPKIR

SEQ ID NO: 6372 - protein, 27 aa, Artificial Sequence
  Cyclic GFR-binding peptide
AAAAPKRGVIKRVQVPRLKTPAKRVYE

SEQ ID NO: 6373 - protein, 29 aa, Artificial Sequence
  Cyclic GFR-binding peptide
AAAAAAPTKGIIKRVQVPRLQTPAKRVIE

SEQ ID NO: 6374 - protein, 27 aa, Artificial Sequence
  Cyclic GFR-binding peptide
GGGGPTRGVIKRVQVPRLKTPVKENED

SEQ ID NO: 6375 - protein, 29 aa, Artificial Sequence
  Cyclic GFR-binding peptide
GGGGGGHPKIRIKRVQVPRMKTPTNKNED

SEQ ID NO: 6376 - protein, 27 aa, Artificial Sequence
  Cyclic GFR-binding peptide
AAAAHPKIRIKRVQVPRLRAPVKDYED

SEQ ID NO: 6377 - protein, 29 aa, Artificial Sequence
  Cyclic GFR-binding peptide
AAAAAAHPKIRIKRVQVPRLRTPVNSSDD

SEQ ID NO: 6378 - protein, 27 aa, Artificial Sequence
  Cyclic GFR-binding peptide
GGGGHPKIRIKRVQVPRTKVPANSSDD

SEQ ID NO: 6379 - protein, 29 aa, Artificial Sequence
  Cyclic GFR-binding peptide
GGGGGGKRVYEIKRVQVPRLAQPVNSSDD

SEQ ID NO: 6380 - protein, 27 aa, Artificial Sequence
  Cyclic GFR-binding peptide
AAAAKRVIEIKRVQVPRLDQSVNNSSD

SEQ ID NO: 6381 - protein, 27 aa, Artificial Sequence
  Cyclic GFR-binding peptide
GGGGKENEDIKRVQVPRLDQPVVGMDD

SEQ ID NO: 6382 - protein, 29 aa, Artificial Sequence
  Cyclic GFR-binding peptide
GGGGGGNKNEDIKRVQVPREETPVVVGKD

SEQ ID NO: 6383 - protein, 27 aa, Artificial Sequence
  Cyclic GFR-binding peptide
AAAAKDYEDIKRVQVPRQGTPVQQKDN

SEQ ID NO: 6384 - protein, 29 aa, Artificial Sequence
  Cyclic GFR-binding peptide
AAAAAANSSDDIKRVQVPRHHVRSNNAAD

SEQ ID NO: 6385 - protein, 22 aa, Artificial Sequence
  Cyclic GFR-binding peptide
  MOD_RES (16)..(17): Xaa is C or S
EDKYLMSIPSLETPVXXAKPIS

SEQ ID NO: 6386 - protein, 15 aa, Artificial Sequence
  Cyclic GFR-binding peptide
IKPTKGIFYLISIAN

SEQ ID NO: 6387 - protein, 13 aa, Artificial Sequence
  Cyclic GFR-binding peptide
LYLVSIASLQTPA

SEQ ID NO: 6388 - protein, 26 aa, Artificial Sequence
  Cyclic GFR-binding peptide
  MOD_RES (22)..(22): Xaa is C or S
KKRVIEKYLVSIPSLQVQTPRXQVNR

SEQ ID NO: 6389 - protein, 21 aa, Artificial Sequence
  Cyclic GFR-binding peptide
FIPKKRVIEFYLVSIANLQVQ

SEQ ID NO: 6390 - protein, 15 aa, Artificial Sequence
  Cyclic GFR-binding peptide
IVNSSDDKYLVSIPS

SEQ ID NO: 6391 - protein, 17 aa, Artificial Sequence
  Cyclic GFR-binding peptide
IVNSSDDLYLVSIASLK

SEQ ID NO: 6392 - protein, 19 aa, Artificial Sequence
  Cyclic GFR-binding peptide
  MOD_RES (14)..(15): Xaa is C or S
LYLISIASLDQSVXXPSAS

SEQ ID NO: 6393 - protein, 18 aa, Artificial Sequence
  Cyclic GFR-binding peptide
FIPKKRVIEFYLVSIANL

SEQ ID NO: 6394 - protein, 24 aa, Artificial Sequence
  Cyclic GFR-binding peptide
  MOD_RES (18)..(19): Xaa is C or S
SSDDYYLVSTASLQTPAXXPKPVT

SEQ ID NO: 6395 - protein, 21 aa, Artificial Sequence
  Cyclic GFR-binding peptide
  MOD_RES (15)..(15): Xaa is C or S
DKYLVSIPSLKTPAXTPKTVH

SEQ ID NO: 6396 - protein, 21 aa, Artificial Sequence
  Cyclic GFR-binding peptide
  MOD_RES (15)..(16): Xaa is C or S
DFYLMSIANLETPVXXAKPIS

SEQ ID NO: 6397 - protein, 17 aa, Artificial Sequence
  Cyclic GFR-binding peptide
VKPTRGVKYLISIPSLD

SEQ ID NO: 6398 - protein, 23 aa, Artificial Sequence
  Cyclic GFR-binding peptide
  MOD_RES (17)..(18): Xaa is C or S
YEDKYLMSIPSLETPVXXAKPIS

SEQ ID NO: 6399 - protein, 13 aa, Artificial Sequence
  Cyclic GFR-binding peptide
LYLISIASLAQPV

SEQ ID NO: 6400 - protein, 22 aa, Artificial Sequence
  Cyclic GFR-binding peptide
  MOD_RES (16)..(17): Xaa is C or S
DDYYLVSTASLQTPAXXPKPVT

SEQ ID NO: 6401 - protein, 16 aa, Artificial Sequence
  Cyclic GFR-binding peptide
  MOD_RES (14)..(15): Xaa is C or S
YYLVSTASLQTPAXXP

SEQ ID NO: 6402 - protein, 15 aa, Artificial Sequence
  Cyclic GFR-binding peptide
IKPTKGILYLISIAS

SEQ ID NO: 6403 - protein, 26 aa, Artificial Sequence
  Cyclic GFR-binding peptide
  MOD_RES (20)..(21): Xaa is C or S
KPTRGVFYLISIANLDQPVXXPSASA

SEQ ID NO: 6404 - protein, 16 aa, Artificial Sequence
  Cyclic GFR-binding peptide
  MOD_RES (14)..(15): Xaa is C or S
YYLISTASLAQPVXXP

SEQ ID NO: 6405 - protein, 23 aa, Artificial Sequence
  Cyclic GFR-binding peptide
  MOD_RES (17)..(18): Xaa is C or S
RGVLYLISIASLAQPVXXPAASA

SEQ ID NO: 6406 - protein, 24 aa, Artificial Sequence
  Cyclic GFR-binding peptide
  MOD_RES (18)..(19): Xaa is C or S
TRGVLYLISIASLDQPVXXPSASA

SEQ ID NO: 6407 - protein, 26 aa, Artificial Sequence
  Cyclic GFR-binding peptide
  MOD_RES (20)..(21): Xaa is C or S
KPKRGVLYLISIASLAQPVXXPAASA

SEQ ID NO: 6408 - protein, 22 aa, Artificial Sequence
  Cyclic GFR-binding peptide
  MOD_RES (16)..(17): Xaa is C or S
SDKYLVSIPSLKTPAXXAKPVA

SEQ ID NO: 6409 - protein, 18 aa, Artificial Sequence
  Cyclic GFR-binding peptide
  MOD_RES (14)..(15): Xaa is C or S
YYLISTASLDQPVXXPSA

SEQ ID NO: 6410 - protein, 18 aa, Artificial Sequence
  Cyclic GFR-binding peptide
  MOD_RES (14)..(15): Xaa is C or S
YYLISTASLAQPVXXPAA

SEQ ID NO: 6411 - protein, 18 aa, Artificial Sequence
  Cyclic GFR-binding peptide
  MOD_RES (14)..(15): Xaa is C or S
FYLVSIANLKTPAXXAKP

SEQ ID NO: 6412 - protein, 26 aa, Artificial Sequence
  Cyclic GFR-binding peptide
  MOD_RES (20)..(21): Xaa is C or S
VNNSSDKYLVSIPSLKTPAXXAKPVA

SEQ ID NO: 6413 - protein, 18 aa, Artificial Sequence
  Cyclic GFR-binding peptide
VVKENEDYYLMSTASLET

SEQ ID NO: 6414 - protein, 24 aa, Artificial Sequence
  Cyclic GFR-binding peptide
  MOD_RES (18)..(19): Xaa is C or S
ENEDKYLMSIPSLETPVXXAKPIK

SEQ ID NO: 6415 - protein, 25 aa, Artificial Sequence
  Cyclic GFR-binding peptide
  MOD_RES (19)..(20): Xaa is C or S
PTRGVFYLISIANLDQPVXXPSASA

SEQ ID NO: 6416 - protein, 17 aa, Artificial Sequence
  Cyclic GFR-binding peptide
  MOD_RES (16)..(16): Xaa is C or S
KYLVSIPSLQVQTPRXQ

SEQ ID NO: 6417 - protein, 21 aa, Artificial Sequence
  Cyclic GFR-binding peptide
FIPKKRVIELYLVSIASLQVQ

SEQ ID NO: 6418 - protein, 18 aa, Artificial Sequence
  Cyclic GFR-binding peptide
  MOD_RES (16)..(16): Xaa is C or S
LYLVSIASLQVQTPRXQV

SEQ ID NO: 6419 - protein, 17 aa, Artificial Sequence
  Cyclic GFR-binding peptide
IVNSSDDLYLVSIASLQ

SEQ ID NO: 6420 - protein, 21 aa, Artificial Sequence
  Cyclic GFR-binding peptide
  MOD_RES (15)..(16): Xaa is C or S
DLYLVSIASLKTPAXXAKPVA

SEQ ID NO: 6421 - protein, 24 aa, Artificial Sequence
  Cyclic GFR-binding peptide
  MOD_RES (18)..(19): Xaa is C or S
KRGVYYLISTASLAQPVXXPAASA

SEQ ID NO: 6422 - protein, 25 aa, Artificial Sequence
  Cyclic GFR-binding peptide
  MOD_RES (19)..(20): Xaa is C or S
PTKGIYYLISTASLDQSVXXPSASA

SEQ ID NO: 6423 - protein, 22 aa, Artificial Sequence
  Cyclic GFR-binding peptide
  MOD_RES (16)..(17): Xaa is C or S
GIKYLISIPSLDQSVXXPSASA

SEQ ID NO: 6424 - protein, 25 aa, Artificial Sequence
  Cyclic GFR-binding peptide
  MOD_RES (19)..(20): Xaa is C or S
NNSSDLYLVSIASLKTPAXXAKPVA

SEQ ID NO: 6425 - protein, 17 aa, Artificial Sequence
  Cyclic GFR-binding peptide
  MOD_RES (16)..(16): Xaa is C or S
LYLVSIASLQVQTPRXQ

SEQ ID NO: 6426 - protein, 15 aa, Artificial Sequence
  Cyclic GFR-binding peptide
VKPKRGVFYLISIAN

SEQ ID NO: 6427 - protein, 23 aa, Artificial Sequence
  Cyclic GFR-binding peptide
  MOD_RES (17)..(18): Xaa is C or S
RGVYYLISTASLDQPVXXPSASA

SEQ ID NO: 6428 - protein, 16 aa, Artificial Sequence
  Cyclic GFR-binding peptide
IVNSSDDLYLVSIASL

SEQ ID NO: 6429 - protein, 23 aa, Artificial Sequence
  Cyclic GFR-binding peptide
  MOD_RES (19)..(19): Xaa is C or S
VIELYLVSIASLQVQTPRXQVNR

SEQ ID NO: 6430 - protein, 13 aa, Artificial Sequence
  Cyclic GFR-binding peptide
LYLISIASLDQSV

SEQ ID NO: 6431 - protein, 21 aa, Artificial Sequence
  Cyclic GFR-binding peptide
  MOD_RES (15)..(16): Xaa is C or S
DFYLMSIANLETPVXXAKPIK

SEQ ID NO: 6432 - protein, 29 aa, Artificial Sequence
  Cyclic GFR-binding peptide
  MOD_RES (25)..(25): Xaa is C or S
FIPKKRVIELYLVSIASLQVQTPRXQVNR

SEQ ID NO: 6433 - protein, 16 aa, Artificial Sequence
  Cyclic GFR-binding peptide
IKPTKGIYYLISTASL

SEQ ID NO: 6434 - protein, 20 aa, Artificial Sequence
  Cyclic GFR-binding peptide
  MOD_RES (14)..(15): Xaa is C or S
FYLVSIANLKTPAXXAKPVA

SEQ ID NO: 6435 - protein, 22 aa, Artificial Sequence
  Cyclic GFR-binding peptide
  MOD_RES (16)..(17): Xaa is C or S
DDLYLVSIASLQTPAXXPKPVT

SEQ ID NO: 6436 - protein, 15 aa, Artificial Sequence
  Cyclic GFR-binding peptide
  MOD_RES (14)..(15): Xaa is C or S
LYLISIASLAQPVXX

SEQ ID NO: 6437 - protein, 15 aa, Artificial Sequence
  Cyclic GFR-binding peptide
VKPKRGVYYLISTAS

SEQ ID NO: 6438 - protein, 24 aa, Artificial Sequence
  Cyclic GFR-binding peptide
  MOD_RES (18)..(19): Xaa is C or S
GMDDLYLVSIASLKTPVXXAKGVK

SEQ ID NO: 6439 - protein, 27 aa, Artificial Sequence
  Cyclic GFR-binding peptide
  MOD_RES (21)..(22): Xaa is C or S
VKPKRGVLYLISIASLAQPVXXPAASA

SEQ ID NO: 6440 - protein, 15 aa, Artificial Sequence
  Cyclic GFR-binding peptide
IKPTKGIYYLISTAS

SEQ ID NO: 6441 - protein, 22 aa, Artificial Sequence
  Cyclic GFR-binding peptide
  MOD_RES (18)..(18): Xaa is C or S
IELYLVSIASLQVQTPRXQVNR

SEQ ID NO: 6442 - protein, 15 aa, Artificial Sequence
  Cyclic GFR-binding peptide
  MOD_RES (14)..(14): Xaa is C or S
YYLVSTASLKTPAXT

SEQ ID NO: 6443 - protein, 22 aa, Artificial Sequence
  Cyclic GFR-binding peptide
  MOD_RES (16)..(16): Xaa is C or S
DDKYLVSIPSLKTPAXTPKTVH

SEQ ID NO: 6444 - protein, 25 aa, Artificial Sequence
  Cyclic GFR-binding peptide
  MOD_RES (19)..(20): Xaa is C or S
VGMDDLYLVSIASLKTPVXXAKGVK

SEQ ID NO: 6445 - protein, 29 aa, Artificial Sequence
  Cyclic GFR-binding peptide
  MOD_RES (25)..(25): Xaa is C or S
FIPKKRVIEFYLVSIANLQVQTPRXQVNR

SEQ ID NO: 6446 - protein, 27 aa, Artificial Sequence
  Cyclic GFR-binding peptide
  MOD_RES (21)..(22): Xaa is C or S
VVKDYEDKYLMSIPSLETPVXXAKPIS

SEQ ID NO: 6447 - protein, 27 aa, Artificial Sequence
  Cyclic GFR-binding peptide
  MOD_RES (21)..(22): Xaa is C or S
IVNNSSDFYLVSIANLKTPAXXAKPVA

SEQ ID NO: 6448 - protein, 20 aa, Artificial Sequence
  Cyclic GFR-binding peptide
  MOD_RES (14)..(15): Xaa is C or S
YYLMSTASLETPVXXAKPIS

SEQ ID NO: 6449 - protein, 17 aa, Artificial Sequence
  Cyclic GFR-binding peptide
VKPTRGVFYLISIANLD

SEQ ID NO: 6450 - protein, 17 aa, Artificial Sequence
  Cyclic GFR-binding peptide
  MOD_RES (14)..(15): Xaa is C or S
FYLMSIANLETPVXXAK

SEQ ID NO: 6451 - protein, 17 aa, Artificial Sequence
  Cyclic GFR-binding peptide
IVNSSDDKYLVSIPSLQ

SEQ ID NO: 6452 - protein, 20 aa, Artificial Sequence
  Cyclic GFR-binding peptide
  MOD_RES (14)..(15): Xaa is C or S
LYLVSIASLQTPAXXPKPVT

SEQ ID NO: 6453 - protein, 19 aa, Artificial Sequence
  Cyclic GFR-binding peptide
  MOD_RES (14)..(15): Xaa is C or S
LYLVSIASLQTPAXXPKPV

SEQ ID NO: 6454 - protein, 17 aa, Artificial Sequence
  Cyclic GFR-binding peptide
IVNSSDDKYLVSIPSLK

SEQ ID NO: 6455 - protein, 17 aa, Artificial Sequence
  Cyclic GFR-binding peptide
  MOD_RES (14)..(15): Xaa is C or S
KYLMSIPSLETPVXXAK

SEQ ID NO: 6456 - protein, 14 aa, Artificial Sequence
  Cyclic GFR-binding peptide
  MOD_RES (14)..(14): Xaa is C or S
LYLISIASLAQPVX

SEQ ID NO: 6457 - protein, 20 aa, Artificial Sequence
  Cyclic GFR-binding peptide
  MOD_RES (14)..(15): Xaa is C or S
KYLVSIPSLQTPAXXPKPVT

SEQ ID NO: 6458 - protein, 27 aa, Artificial Sequence
  Cyclic GFR-binding peptide
  MOD_RES (21)..(22): Xaa is C or S
IVNNSSDLYLVSIASLKTPAXXAKPVA

SEQ ID NO: 6459 - protein, 21 aa, Artificial Sequence
  Cyclic GFR-binding peptide
  MOD_RES (15)..(16): Xaa is C or S
VYYLISTASLDQPVXXPSASA

SEQ ID NO: 6460 - protein, 25 aa, Artificial Sequence
  Cyclic GFR-binding peptide
  MOD_RES (19)..(20): Xaa is C or S
KENEDKYLMSIPSLETPVXXAKPIK

SEQ ID NO: 6461 - protein, 27 aa, Artificial Sequence
  Cyclic GFR-binding peptide
  MOD_RES (21)..(22): Xaa is C or S
IVNSSDDYYLVSTASLQTPAXXPKPVT

SEQ ID NO: 6462 - protein, 16 aa, Artificial Sequence
  Cyclic GFR-binding peptide
  MOD_RES (16)..(16): Xaa is C or S
LYLVSIASLQVQTPRX

SEQ ID NO: 6463 - protein, 19 aa, Artificial Sequence
  Cyclic GFR-binding peptide
  MOD_RES (14)..(15): Xaa is C or S
LYLVSIASLKTPAXXAKPV

SEQ ID NO: 6464 - protein, 16 aa, Artificial Sequence
  Cyclic GFR-binding peptide
VKPKRGVYYLISTASL

SEQ ID NO: 6465 - protein, 20 aa, Artificial Sequence
  Cyclic GFR-binding peptide
  MOD_RES (14)..(15): Xaa is C or S
KYLVSIPSLKTPAXXAKPVA

SEQ ID NO: 6466 - protein, 27 aa, Artificial Sequence
  Cyclic GFR-binding peptide
  MOD_RES (21)..(22): Xaa is C or S
VVKDYEDFYLMSIANLETPVXXAKPIS

SEQ ID NO: 6467 - protein, 20 aa, Artificial Sequence
  Cyclic GFR-binding peptide
  MOD_RES (16)..(16): Xaa is C or S
FYLVSIANLQVQTPRXQVNR

SEQ ID NO: 6468 - protein, 19 aa, Artificial Sequence
  Cyclic GFR-binding peptide
VKPTRGVKYLISIPSLDQP

SEQ ID NO: 6469 - protein, 23 aa, Artificial Sequence
  Cyclic GFR-binding peptide
  MOD_RES (19)..(19): Xaa is C or S
VIEFYLVSIANLQVQTPRXQVNR

SEQ ID NO: 6470 - protein, 19 aa, Artificial Sequence
  Cyclic GFR-binding peptide
  MOD_RES (14)..(15): Xaa is C or S
LYLISIASLDQPVXXPSAS

SEQ ID NO: 6471 - protein, 26 aa, Artificial Sequence
  Cyclic GFR-binding peptide
  MOD_RES (20)..(21): Xaa is C or S
KPKRGVYYLISTASLAQPVXXPAASA

SEQ ID NO: 6472 - protein, 28 aa, Artificial Sequence
  Cyclic GFR-binding peptide
  MOD_RES (24)..(24): Xaa is C or S
IPKKRVIELYLVSIASLQVQTPRXQVNR

SEQ ID NO: 6473 - protein, 16 aa, Artificial Sequence
  Cyclic GFR-binding peptide
IKPTKGILYLISIASL

SEQ ID NO: 6474 - protein, 24 aa, Artificial Sequence
  Cyclic GFR-binding peptide
  MOD_RES (18)..(19): Xaa is C or S
GMDDFYLVSIANLKTPVXXAKGVK

SEQ ID NO: 6475 - protein, 26 aa, Artificial Sequence
  Cyclic GFR-binding peptide
  MOD_RES (20)..(21): Xaa is C or S
KPKRGVKYLISIPSLAQPVXXPAASA

SEQ ID NO: 6476 - protein, 25 aa, Artificial Sequence
  Cyclic GFR-binding peptide
  MOD_RES (21)..(21): Xaa is C or S
KRVIEYYLVSTASLQVQTPRXQVNR

SEQ ID NO: 6477 - protein, 19 aa, Artificial Sequence
  Cyclic GFR-binding peptide
  MOD_RES (14)..(15): Xaa is C or S
KYLISIPSLDQSVXXPSAS

SEQ ID NO: 6478 - protein, 17 aa, Artificial Sequence
  Cyclic GFR-binding peptide
  MOD_RES (14)..(14): Xaa is C or S
LYLVSIASLKTPAXTPK

SEQ ID NO: 6479 - protein, 27 aa, Artificial Sequence
  Cyclic GFR-binding peptide
  MOD_RES (21)..(22): Xaa is C or S
VVKENEDKYLMSIPSLETPVXXAKPIK

SEQ ID NO: 6480 - protein, 19 aa, Artificial Sequence
  Cyclic GFR-binding peptide
IVNSSDDKYLVSIPSLKTP

SEQ ID NO: 6481 - protein, 17 aa, Artificial Sequence
  Cyclic GFR-binding peptide
VKPKRGVKYLISIPSLA

SEQ ID NO: 6482 - protein, 20 aa, Artificial Sequence
  Cyclic GFR-binding peptide
  MOD_RES (14)..(15): Xaa is C or S
FYLMSIANLETPVXXAKPIK

SEQ ID NO: 6483 - protein, 24 aa, Artificial Sequence
  Cyclic GFR-binding peptide
  MOD_RES (18)..(19): Xaa is C or S
TKGIYYLISTASLDQSVXXPSASA

SEQ ID NO: 6484 - protein, 18 aa, Artificial Sequence
  Cyclic GFR-binding peptide
  MOD_RES (16)..(16): Xaa is C or S
FYLVSIANLQVQTPRXQV

SEQ ID NO: 6485 - protein, 27 aa, Artificial Sequence
  Cyclic GFR-binding peptide
  MOD_RES (23)..(23): Xaa is C or S
PKKRVIEFYLVSIANLQVQTPRXQVNR

SEQ ID NO: 6486 - protein, 22 aa, Artificial Sequence
  Cyclic GFR-binding peptide
  MOD_RES (16)..(17): Xaa is C or S
GVKYLISIPSLAQPVXXPAASA

SEQ ID NO: 6487 - protein, 17 aa, Artificial Sequence
  Cyclic GFR-binding peptide
  MOD_RES (14)..(15): Xaa is C or S
LYLVSIASLKTPAXXPK

SEQ ID NO: 6488 - protein, 21 aa, Artificial Sequence
  Cyclic GFR-binding peptide
  MOD_RES (15)..(16): Xaa is C or S
DLYLVSIASLKTPAXXPKPVY

SEQ ID NO: 6489 - protein, 19 aa, Artificial Sequence
  Cyclic GFR-binding peptide
IVNSSDDKYLVSIPSLQTP

SEQ ID NO: 6490 - protein, 18 aa, Artificial Sequence
  Cyclic GFR-binding peptide
  MOD_RES (14)..(15): Xaa is C or S
LYLVSIASLKTPAXXAKP

SEQ ID NO: 6491 - protein, 22 aa, Artificial Sequence
  Cyclic GFR-binding peptide
  MOD_RES (16)..(17): Xaa is C or S
EDKYLMSIPSLETPVXXAKPIK

SEQ ID NO: 6492 - protein, 23 aa, Artificial Sequence
  Cyclic GFR-binding peptide
  MOD_RES (17)..(18): Xaa is C or S
RGVYYLISTASLAQPVXXPAASA

SEQ ID NO: 6493 - protein, 27 aa, Artificial Sequence
  Cyclic GFR-binding peptide
  MOD_RES (23)..(23): Xaa is C or S
PKKRVIELYLVSIASLQVQTPRXQVNR

SEQ ID NO: 6494 - protein, 27 aa, Artificial Sequence
  Cyclic GFR-binding peptide
  MOD_RES (21)..(22): Xaa is C or S
VKPKRGVKYLISIPSLAQPVXXPAASA

SEQ ID NO: 6495 - protein, 15 aa, Artificial Sequence
  Cyclic GFR-binding peptide
  MOD_RES (14)..(15): Xaa is C or S
FYLISIANLAQPVXX

SEQ ID NO: 6496 - protein, 21 aa, Artificial Sequence
  Cyclic GFR-binding peptide
  MOD_RES (15)..(16): Xaa is C or S
DKYLMSIPSLETPVXXAKPIK

SEQ ID NO: 6497 - protein, 13 aa, Artificial Sequence
  Cyclic GFR-binding peptide
LYLISIASLDQPV

SEQ ID NO: 6498 - protein, 13 aa, Artificial Sequence
  Cyclic GFR-binding peptide
FYLISIANLAQPV

SEQ ID NO: 6499 - protein, 19 aa, Artificial Sequence
  Cyclic GFR-binding peptide
VKPTRGVLYLISIASLDQP

SEQ ID NO: 6500 - protein, 24 aa, Artificial Sequence
  Cyclic GFR-binding peptide
  MOD_RES (18)..(19): Xaa is C or S
TRGVKYLISIPSLDQPVXXPSASA

SEQ ID NO: 6501 - protein, 19 aa, Artificial Sequence
  Cyclic GFR-binding peptide
VKPKRGVKYLISIPSLAQP

SEQ ID NO: 6502 - protein, 14 aa, Artificial Sequence
  Cyclic GFR-binding peptide
  MOD_RES (14)..(14): Xaa is C or S
YYLMSTASLETPVX

SEQ ID NO: 6503 - protein, 26 aa, Artificial Sequence
  Cyclic GFR-binding peptide
  MOD_RES (22)..(22): Xaa is C or S
KKRVIEYYLVSTASLQVQTPRXQVNR

SEQ ID NO: 6504 - protein, 17 aa, Artificial Sequence
  Cyclic GFR-binding peptide
VKPKRGVFYLISIANLA

SEQ ID NO: 6505 - protein, 25 aa, Artificial Sequence
  Cyclic GFR-binding peptide
  MOD_RES (19)..(19): Xaa is C or S
NSSDDLYLVSIASLKTPAXTPKTVH

SEQ ID NO: 6506 - protein, 16 aa, Artificial Sequence
  Cyclic GFR-binding peptide
  MOD_RES (14)..(15): Xaa is C or S
YYLISTASLDQPVXXP

SEQ ID NO: 6507 - protein, 25 aa, Artificial Sequence
  Cyclic GFR-binding peptide
  MOD_RES (19)..(20): Xaa is C or S
PTRGVKYLISIPSLDQPVXXPSASA

SEQ ID NO: 6508 - protein, 16 aa, Artificial Sequence
  Cyclic GFR-binding peptide
VKPTRGVYYLISTASL

SEQ ID NO: 6509 - protein, 21 aa, Artificial Sequence
  Cyclic GFR-binding peptide
  MOD_RES (15)..(16): Xaa is C or S
VLYLISIASLDQPVXXPSASA

SEQ ID NO: 6510 - protein, 18 aa, Artificial Sequence
  Cyclic GFR-binding peptide
TPVGMDDYYLVSTASLKT

SEQ ID NO: 6511 - protein, 18 aa, Artificial Sequence
  Cyclic GFR-binding peptide
  MOD_RES (14)..(15): Xaa is C or S
YYLVSTASLKTPVXXAKG

SEQ ID NO: 6512 - protein, 27 aa, Artificial Sequence
  Cyclic GFR-binding peptide
  MOD_RES (21)..(22): Xaa is C or S
IVNNSSDKYLVSIPSLKTPAXXAKPVA

SEQ ID NO: 6513 - protein, 16 aa, Artificial Sequence
  Cyclic GFR-binding peptide
  MOD_RES (14)..(15): Xaa is C or S
YYLISTASLDQSVXXP

SEQ ID NO: 6514 - protein, 25 aa, Artificial Sequence
  Cyclic GFR-binding peptide
  MOD_RES (19)..(20): Xaa is C or S
KENEDFYLMSIANLETPVXXAKPIK

SEQ ID NO: 6515 - protein, 20 aa, Artificial Sequence
  Cyclic GFR-binding peptide
  MOD_RES (14)..(15): Xaa is C or S
KYLISIPSLDQPVXXPSASA

SEQ ID NO: 6516 - protein, 24 aa, Artificial Sequence
  Cyclic GFR-binding peptide
  MOD_RES (18)..(19): Xaa is C or S
DYEDYYLMSTASLETPVXXAKPIS

SEQ ID NO: 6517 - protein, 24 aa, Artificial Sequence
  Cyclic GFR-binding peptide
  MOD_RES (18)..(18): Xaa is C or S
SSDDKYLVSIPSLKTPAXTPKTVH

SEQ ID NO: 6518 - protein, 19 aa, Artificial Sequence
  Cyclic GFR-binding peptide
  MOD_RES (14)..(15): Xaa is C or S
FYLVSIANLKTPVXXAKGV

SEQ ID NO: 6519 - protein, 26 aa, Artificial Sequence
  Cyclic GFR-binding peptide
  MOD_RES (22)..(22): Xaa is C or S
KKRVIEFYLVSIANLQVQTPRXQVNR

SEQ ID NO: 6520 - protein, 26 aa, Artificial Sequence
  Cyclic GFR-binding peptide
  MOD_RES (20)..(21): Xaa is C or S
PVGMDDLYLVSIASLKTPVXXAKGVK

SEQ ID NO: 6521 - protein, 26 aa, Artificial Sequence
  Cyclic GFR-binding peptide
  MOD_RES (20)..(21): Xaa is C or S
VNNSSDLYLVSIASLKTPAXXAKPVA

SEQ ID NO: 6522 - protein, 21 aa, Artificial Sequence
  Cyclic GFR-binding peptide
  MOD_RES (15)..(16): Xaa is C or S
VKYLISIPSLAQPVXXPAASA

SEQ ID NO: 6523 - protein, 18 aa, Artificial Sequence
  Cyclic GFR-binding peptide
  MOD_RES (14)..(15): Xaa is C or S
LYLVSIASLQTPAXXPKP

SEQ ID NO: 6524 - protein, 15 aa, Artificial Sequence
  Cyclic GFR-binding peptide
  MOD_RES (14)..(15): Xaa is C or S
LYLVSIASLQTPAXX

SEQ ID NO: 6525 - protein, 20 aa, Artificial Sequence
  Cyclic GFR-binding peptide
  MOD_RES (14)..(15): Xaa is C or S
FYLISIANLAQPVXXPAASA

SEQ ID NO: 6526 - protein, 13 aa, Artificial Sequence
  Cyclic GFR-binding peptide
LYLVSIASLQVQT

SEQ ID NO: 6527 - protein, 19 aa, Artificial Sequence
  Cyclic GFR-binding peptide
  MOD_RES (14)..(14): Xaa is C or S
LYLVSIASLKTPAXTPKTV

SEQ ID NO: 6528 - protein, 20 aa, Artificial Sequence
  Cyclic GFR-binding peptide
  MOD_RES (14)..(15): Xaa is C or S
LYLISIASLAQPVXXPAASA

SEQ ID NO: 6529 - protein, 13 aa, Artificial Sequence
  Cyclic GFR-binding peptide
FYLVSIANLQVQT

SEQ ID NO: 6530 - protein, 25 aa, Artificial Sequence
  Cyclic GFR-binding peptide
  MOD_RES (19)..(20): Xaa is C or S
NSSDDYYLVSTASLKTPAXXPKPVY

SEQ ID NO: 6531 - protein, 24 aa, Artificial Sequence
  Cyclic GFR-binding peptide
  MOD_RES (18)..(19): Xaa is C or S
NSSDLYLVSIASLKTPAXXAKPVA

SEQ ID NO: 6532 - protein, 15 aa, Artificial Sequence
  Cyclic GFR-binding peptide
VKPTRGVFYLISIAN

SEQ ID NO: 6533 - protein, 15 aa, Artificial Sequence
  Cyclic GFR-binding peptide
IVNSSDDLYLVSIAS

SEQ ID NO: 6534 - protein, 21 aa, Artificial Sequence
  Cyclic GFR-binding peptide
  MOD_RES (15)..(16): Xaa is C or S
DLYLVSIASLQTPAXXPKPVT

SEQ ID NO: 6535 - protein, 17 aa, Artificial Sequence
  Cyclic GFR-binding peptide
VKPTRGVLYLISIASLD

SEQ ID NO: 6536 - protein, 19 aa, Artificial Sequence
  Cyclic GFR-binding peptide
IKPTKGIYYLISTASLDQS

SEQ ID NO: 6537 - protein, 27 aa, Artificial Sequence
  Cyclic GFR-binding peptide
  MOD_RES (21)..(22): Xaa is C or S
VKPKRGVFYLISIANLAQPVXXPAASA

SEQ ID NO: 6538 - protein, 25 aa, Artificial Sequence
  Cyclic GFR-binding peptide
  MOD_RES (19)..(20): Xaa is C or S
NSSDDLYLVSIASLQTPAXXPKPVT

SEQ ID NO: 6539 - protein, 27 aa, Artificial Sequence
  Cyclic GFR-binding peptide
  MOD_RES (23)..(23): Xaa is C or S
PKKRVIEKYLVSIPSLQVQTPRXQVNR

SEQ ID NO: 6540 - protein, 26 aa, Artificial Sequence
  Cyclic GFR-binding peptide
  MOD_RES (20)..(21): Xaa is C or S
KPTKGIYYLISTASLDQSVXXPSASA

SEQ ID NO: 6541 - protein, 18 aa, Artificial Sequence
  Cyclic GFR-binding peptide
  MOD_RES (14)..(14): Xaa is C or S
LYLVSIASLKTPAXTPKT

SEQ ID NO: 6542 - protein, 20 aa, Artificial Sequence
  Cyclic GFR-binding peptide
  MOD_RES (16)..(16): Xaa is C or S
LYLVSIASLQVQTPRXQVNR

SEQ ID NO: 6543 - protein, 23 aa, Artificial Sequence
  Cyclic GFR-binding peptide
  MOD_RES (17)..(18): Xaa is C or S
SSDKYLVSIPSLKTPAXXAKPVA

SEQ ID NO: 6544 - protein, 15 aa, Artificial Sequence
  Cyclic GFR-binding peptide
LYLVSIASLQVQTPR

SEQ ID NO: 6545 - protein, 21 aa, Artificial Sequence
  Cyclic GFR-binding peptide
  MOD_RES (15)..(16): Xaa is C or S
VFYLISIANLAQPVXXPAASA

SEQ ID NO: 6546 - protein, 26 aa, Artificial Sequence
  Cyclic GFR-binding peptide
  MOD_RES (20)..(21): Xaa is C or S
KPTKGIFYLISIANLDQSVXXPSASA

SEQ ID NO: 6547 - protein, 17 aa, Artificial Sequence
  Cyclic GFR-binding peptide
  MOD_RES (14)..(15): Xaa is C or S
LYLVSIASLQTPAXXPK

SEQ ID NO: 6548 - protein, 23 aa, Artificial Sequence
  Cyclic GFR-binding peptide
  MOD_RES (17)..(17): Xaa is C or S
SDDKYLVSIPSLKTPAXTPKTVH

SEQ ID NO: 6549 - protein, 17 aa, Artificial Sequence
  Cyclic GFR-binding peptide
  MOD_RES (14)..(15): Xaa is C or S
YYLVSTASLKTPVXXAK

SEQ ID NO: 6550 - protein, 26 aa, Artificial Sequence
  Cyclic GFR-binding peptide
  MOD_RES (20)..(21): Xaa is C or S
VNSSDDLYLVSIASLKTPAXXPKPVY

SEQ ID NO: 6551 - protein, 22 aa, Artificial Sequence
  Cyclic GFR-binding peptide
  MOD_RES (16)..(17): Xaa is C or S
DDKYLVSIPSLKTPAXXPKPVY

SEQ ID NO: 6552 - protein, 19 aa, Artificial Sequence
  Cyclic GFR-binding peptide
VVKENEDFYLMSIANLETP

SEQ ID NO: 6553 - protein, 27 aa, Artificial Sequence
  Cyclic GFR-binding peptide
  MOD_RES (21)..(22): Xaa is C or S
VVKENEDFYLMSIANLETPVXXAKPIK

SEQ ID NO: 6554 - protein, 15 aa, Artificial Sequence
  Cyclic GFR-binding peptide
  MOD_RES (14)..(15): Xaa is C or S
KYLVSIPSLKTPAXX

SEQ ID NO: 6555 - protein, 23 aa, Artificial Sequence
  Cyclic GFR-binding peptide
  MOD_RES (17)..(18): Xaa is C or S
KGIKYLISIPSLDQSVXXPSASA

SEQ ID NO: 6556 - protein, 19 aa, Artificial Sequence
  Cyclic GFR-binding peptide
FIPKKRVIEYYLVSTASLQ

SEQ ID NO: 6557 - protein, 24 aa, Artificial Sequence
  Cyclic GFR-binding peptide
  MOD_RES (18)..(19): Xaa is C or S
SSDDLYLVSIASLQTPAXXPKPVT

SEQ ID NO: 6558 - protein, 25 aa, Artificial Sequence
  Cyclic GFR-binding peptide
  MOD_RES (19)..(20): Xaa is C or S
KDYEDFYLMSIANLETPVXXAKPIS

SEQ ID NO: 6559 - protein, 16 aa, Artificial Sequence
  Cyclic GFR-binding peptide
  MOD_RES (14)..(15): Xaa is C or S
KYLVSIPSLKTPAXXP

SEQ ID NO: 6560 - protein, 23 aa, Artificial Sequence
  Cyclic GFR-binding peptide
  MOD_RES (17)..(18): Xaa is C or S
RGVFYLISIANLDQPVXXPSASA

SEQ ID NO: 6561 - protein, 19 aa, Artificial Sequence
  Cyclic GFR-binding peptide
  MOD_RES (14)..(15): Xaa is C or S
KYLISIPSLAQPVXXPAAS

SEQ ID NO: 6562 - protein, 26 aa, Artificial Sequence
  Cyclic GFR-binding peptide
  MOD_RES (20)..(20): Xaa is C or S
VNSSDDLYLVSIASLKTPAXTPKTVH

SEQ ID NO: 6563 - protein, 23 aa, Artificial Sequence
  Cyclic GFR-binding peptide
  MOD_RES (17)..(18): Xaa is C or S
NEDFYLMSIANLETPVXXAKPIK

SEQ ID NO: 6564 - protein, 19 aa, Artificial Sequence
  Cyclic GFR-binding peptide
  MOD_RES (14)..(15): Xaa is C or S
FYLISIANLAQPVXXPAAS

SEQ ID NO: 6565 - protein, 13 aa, Artificial Sequence
  Cyclic GFR-binding peptide
KYLISIPSLDQPV

SEQ ID NO: 6566 - protein, 19 aa, Artificial Sequence
  Cyclic GFR-binding peptide
  MOD_RES (16)..(16): Xaa is C or S
YYLVSTASLQVQTPRXQVN

SEQ ID NO: 6567 - protein, 25 aa, Artificial Sequence
  Cyclic GFR-binding peptide
  MOD_RES (19)..(20): Xaa is C or S
KDYEDYYLMSTASLETPVXXAKPIS

SEQ ID NO: 6568 - protein, 14 aa, Artificial Sequence
  Cyclic GFR-binding peptide
  MOD_RES (14)..(14): Xaa is C or S
KYLVSIPSLQTPAX

SEQ ID NO: 6569 - protein, 15 aa, Artificial Sequence
  Cyclic GFR-binding peptide
VKPTRGVKYLISIPS

SEQ ID NO: 6570 - protein, 19 aa, Artificial Sequence
  Cyclic GFR-binding peptide
VKPKRGVLYLISIASLAQP

SEQ ID NO: 6571 - protein, 24 aa, Artificial Sequence
  Cyclic GFR-binding peptide
  MOD_RES (18)..(19): Xaa is C or S
ENEDYYLMSTASLETPVXXAKPIK

SEQ ID NO: 6572 - protein, 23 aa, Artificial Sequence
  Cyclic GFR-binding peptide
  MOD_RES (17)..(18): Xaa is C or S
SDDLYLVSIASLQTPAXXPKPVT

SEQ ID NO: 6573 - protein, 22 aa, Artificial Sequence
  Cyclic GFR-binding peptide
  MOD_RES (16)..(17): Xaa is C or S
DDKYLVSIPSLQTPAXXPKPVT

SEQ ID NO: 6574 - protein, 16 aa, Artificial Sequence
  Cyclic GFR-binding peptide
VVKDYEDFYLMSIANL

SEQ ID NO: 6575 - protein, 18 aa, Artificial Sequence
  Cyclic GFR-binding peptide
VVKENEDKYLMSIPSLET

SEQ ID NO: 6576 - protein, 15 aa, Artificial Sequence
  Cyclic GFR-binding peptide
YYLVSTASLQVQTPR

SEQ ID NO: 6577 - protein, 14 aa, Artificial Sequence
  Cyclic GFR-binding peptide
YYLVSTASLQVQTP

SEQ ID NO: 6578 - protein, 19 aa, Artificial Sequence
  Cyclic GFR-binding peptide
VKPTRGVYYLISTASLDQP

SEQ ID NO: 6579 - protein, 17 aa, Artificial Sequence
  Cyclic GFR-binding peptide
  MOD_RES (14)..(15): Xaa is C or S
YYLMSTASLETPVXXAK

SEQ ID NO: 6580 - protein, 17 aa, Artificial Sequence
  Cyclic GFR-binding peptide
FIPKKRVIELYLVSIAS

SEQ ID NO: 6581 - protein, 16 aa, Artificial Sequence
  Cyclic GFR-binding peptide
  MOD_RES (16)..(16): Xaa is C or S
KYLVSIPSLQVQTPRX

SEQ ID NO: 6582 - protein, 27 aa, Artificial Sequence
  Cyclic GFR-binding peptide
  MOD_RES (21)..(21): Xaa is C or S
IVNSSDDKYLVSIPSLKTPAXTPKTVH

SEQ ID NO: 6583 - protein, 28 aa, Artificial Sequence
  Cyclic GFR-binding peptide
  MOD_RES (24)..(24): Xaa is C or S
IPKKRVIEYYLVSTASLQVQTPRXQVNR

SEQ ID NO: 6584 - protein, 25 aa, Artificial Sequence
  Cyclic GFR-binding peptide
  MOD_RES (19)..(20): Xaa is C or S
NSSDDKYLVSIPSLKTPAXXPKPVY

SEQ ID NO: 6585 - protein, 21 aa, Artificial Sequence
  Cyclic GFR-binding peptide
  MOD_RES (17)..(17): Xaa is C or S
EYYLVSTASLQVQTPRXQVNR

SEQ ID NO: 6586 - protein, 18 aa, Artificial Sequence
  Cyclic GFR-binding peptide
VKPTRGVKYLISIPSLDQ

SEQ ID NO: 6587 - protein, 23 aa, Artificial Sequence
  Cyclic GFR-binding peptide
  MOD_RES (17)..(18): Xaa is C or S
SDDLYLVSIASLKTPAXXPKPVY

SEQ ID NO: 6588 - protein, 18 aa, Artificial Sequence
  Cyclic GFR-binding peptide
IVNSSDDLYLVSIASLKT

SEQ ID NO: 6589 - protein, 14 aa, Artificial Sequence
  Cyclic GFR-binding peptide
  MOD_RES (14)..(14): Xaa is C or S
LYLVSIASLKTPAX

SEQ ID NO: 6590 - protein, 19 aa, Artificial Sequence
  Cyclic GFR-binding peptide
  MOD_RES (14)..(15): Xaa is C or S
LYLVSIASLKTPAXXPKPV

SEQ ID NO: 6591 - protein, 19 aa, Artificial Sequence
  Cyclic GFR-binding peptide
  MOD_RES (14)..(15): Xaa is C or S
FYLMSIANLETPVXXAKPI

SEQ ID NO: 6592 - protein, 17 aa, Artificial Sequence
  Cyclic GFR-binding peptide
  MOD_RES (14)..(15): Xaa is C or S
LYLISIASLDQPVXXPS

SEQ ID NO: 6593 - protein, 27 aa, Artificial Sequence
  Cyclic GFR-binding peptide
  MOD_RES (23)..(23): Xaa is C or S
PKKRVIEYYLVSTASLQVQTPRXQVNR

SEQ ID NO: 6594 - protein, 14 aa, Artificial Sequence
  Cyclic GFR-binding peptide
  MOD_RES (14)..(14): Xaa is C or S
YYLVSTASLKTPVX

SEQ ID NO: 6595 - protein, 20 aa, Artificial Sequence
  Cyclic GFR-binding peptide
  MOD_RES (14)..(15): Xaa is C or S
KYLMSIPSLETPVXXAKPIS

SEQ ID NO: 6596 - protein, 26 aa, Artificial Sequence
  Cyclic GFR-binding peptide
  MOD_RES (20)..(21): Xaa is C or S
VKDYEDYYLMSTASLETPVXXAKPIS

SEQ ID NO: 6597 - protein, 20 aa, Artificial Sequence
  Cyclic GFR-binding peptide
  MOD_RES (14)..(15): Xaa is C or S
FYLMSIANLETPVXXAKPIS

SEQ ID NO: 6598 - protein, 18 aa, Artificial Sequence
  Cyclic GFR-binding peptide
IVNSSDDLYLVSIASLQT

SEQ ID NO: 6599 - protein, 19 aa, Artificial Sequence
  Cyclic GFR-binding peptide
TPVGMDDLYLVSIASLKTP

SEQ ID NO: 6600 - protein, 15 aa, Artificial Sequence
  Cyclic GFR-binding peptide
  MOD_RES (14)..(15): Xaa is C or S
LYLISIASLDQPVXX

SEQ ID NO: 6601 - protein, 19 aa, Artificial Sequence
  Cyclic GFR-binding peptide
  MOD_RES (14)..(15): Xaa is C or S
KYLISIPSLDQPVXXPSAS

SEQ ID NO: 6602 - protein, 17 aa, Artificial Sequence
  Cyclic GFR-binding peptide
  MOD_RES (14)..(15): Xaa is C or S
LYLVSIASLKTPVXXAK

SEQ ID NO: 6603 - protein, 19 aa, Artificial Sequence
  Cyclic GFR-binding peptide
IKPTKGIKYLISIPSLDQS

SEQ ID NO: 6604 - protein, 18 aa, Artificial Sequence
  Cyclic GFR-binding peptide
VKPTRGVFYLISIANLDQ

SEQ ID NO: 6605 - protein, 20 aa, Artificial Sequence
  Cyclic GFR-binding peptide
  MOD_RES (14)..(15): Xaa is C or S
KYLVSIPSLKTPAXXPKPVY

SEQ ID NO: 6606 - protein, 16 aa, Artificial Sequence
  Cyclic GFR-binding peptide
IVNNSSDFYLVSIANL

SEQ ID NO: 6607 - protein, 26 aa, Artificial Sequence
  Cyclic GFR-binding peptide
  MOD_RES (22)..(22): Xaa is C or S
KKRVIELYLVSIASLQVQTPRXQVNR

SEQ ID NO: 6608 - protein, 22 aa, Artificial Sequence
  Cyclic GFR-binding peptide
  MOD_RES (16)..(17): Xaa is C or S
GVLYLISIASLDQPVXXPSASA

SEQ ID NO: 6609 - protein, 16 aa, Artificial Sequence
  Cyclic GFR-binding peptide
  MOD_RES (14)..(15): Xaa is C or S
FYLVSIANLKTPAXXA

SEQ ID NO: 6610 - protein, 16 aa, Artificial Sequence
  Cyclic GFR-binding peptide
  MOD_RES (14)..(14): Xaa is C or S
YYLVSTASLKTPAXTP

SEQ ID NO: 6611 - protein, 19 aa, Artificial Sequence
  Cyclic GFR-binding peptide
FIPKKRVIEKYLVSIPSLQ

SEQ ID NO: 6612 - protein, 19 aa, Artificial Sequence
  Cyclic GFR-binding peptide
VKPTRGVFYLISIANLDQP

SEQ ID NO: 6613 - protein, 15 aa, Artificial Sequence
  Cyclic GFR-binding peptide
  MOD_RES (14)..(15): Xaa is C or S
LYLVSIASLKTPVXX

SEQ ID NO: 6614 - protein, 21 aa, Artificial Sequence
  Cyclic GFR-binding peptide
  MOD_RES (15)..(16): Xaa is C or S
VLYLISIASLAQPVXXPAASA

SEQ ID NO: 6615 - protein, 20 aa, Artificial Sequence
  Cyclic GFR-binding peptide
FIPKKRVIEFYLVSIANLQV

SEQ ID NO: 6616 - protein, 14 aa, Artificial Sequence
  Cyclic GFR-binding peptide
  MOD_RES (14)..(14): Xaa is C or S
LYLISIASLDQSVX

SEQ ID NO: 6617 - protein, 15 aa, Artificial Sequence
  Cyclic GFR-binding peptide
  MOD_RES (14)..(15): Xaa is C or S
FYLVSIANLKTPVXX

SEQ ID NO: 6618 - protein, 19 aa, Artificial Sequence
  Cyclic GFR-binding peptide
  MOD_RES (14)..(15): Xaa is C or S
YYLVSTASLKTPVXXAKGV

SEQ ID NO: 6619 - protein, 22 aa, Artificial Sequence
  Cyclic GFR-binding peptide
  MOD_RES (16)..(17): Xaa is C or S
EDYYLMSTASLETPVXXAKPIS

SEQ ID NO: 6620 - protein, 20 aa, Artificial Sequence
  Cyclic GFR-binding peptide
  MOD_RES (14)..(15): Xaa is C or S
YYLISTASLDQPVXXPSASA

SEQ ID NO: 6621 - protein, 16 aa, Artificial Sequence
  Cyclic GFR-binding peptide
  MOD_RES (14)..(15): Xaa is C or S
LYLISIASLDQPVXXP

SEQ ID NO: 6622 - protein, 15 aa, Artificial Sequence
  Cyclic GFR-binding peptide
  MOD_RES (14)..(15): Xaa is C or S
YYLVSTASLKTPVXX

SEQ ID NO: 6623 - protein, 21 aa, Artificial Sequence
  Cyclic GFR-binding peptide
  MOD_RES (15)..(16): Xaa is C or S
DYYLVSTASLKTPAXXPKPVY

SEQ ID NO: 6624 - protein, 21 aa, Artificial Sequence
  Cyclic GFR-binding peptide
  MOD_RES (15)..(16): Xaa is C or S
DKYLVSIPSLQTPAXXPKPVT

SEQ ID NO: 6625 - protein, 19 aa, Artificial Sequence
  Cyclic GFR-binding peptide
  MOD_RES (14)..(15): Xaa is C or S
KYLVSIPSLQTPAXXPKPV

SEQ ID NO: 6626 - protein, 20 aa, Artificial Sequence
  Cyclic GFR-binding peptide
  MOD_RES (14)..(15): Xaa is C or S
LYLISIASLDQSVXXPSASA

SEQ ID NO: 6627 - protein, 18 aa, Artificial Sequence
  Cyclic GFR-binding peptide
  MOD_RES (14)..(15): Xaa is C or S
FYLISIANLAQPVXXPAA

SEQ ID NO: 6628 - protein, 17 aa, Artificial Sequence
  Cyclic GFR-binding peptide
VKPKRGVLYLISIASLA

SEQ ID NO: 6629 - protein, 16 aa, Artificial Sequence
  Cyclic GFR-binding peptide
  MOD_RES (14)..(14): Xaa is C or S
KYLVSIPSLKTPAXTP

SEQ ID NO: 6630 - protein, 18 aa, Artificial Sequence
  Cyclic GFR-binding peptide
IVNSSDDKYLVSIPSLQT

SEQ ID NO: 6631 - protein, 15 aa, Artificial Sequence
  Cyclic GFR-binding peptide
  MOD_RES (14)..(15): Xaa is C or S
FYLISIANLDQSVXX

SEQ ID NO: 6632 - protein, 27 aa, Artificial Sequence
  Cyclic GFR-binding peptide
  MOD_RES (21)..(22): Xaa is C or S
VVKENEDYYLMSTASLETPVXXAKPIK

SEQ ID NO: 6633 - protein, 19 aa, Artificial Sequence
  Cyclic GFR-binding peptide
VVKENEDYYLMSTASLETP

SEQ ID NO: 6634 - protein, 15 aa, Artificial Sequence
  Cyclic GFR-binding peptide
VKPTRGVLYLISIAS

SEQ ID NO: 6635 - protein, 21 aa, Artificial Sequence
  Cyclic GFR-binding peptide
  MOD_RES (15)..(16): Xaa is C or S
DKYLMSIPSLETPVXXAKPIS

SEQ ID NO: 6636 - protein, 19 aa, Artificial Sequence
  Cyclic GFR-binding peptide
  MOD_RES (14)..(15): Xaa is C or S
KYLVSIPSLKTPAXXPKPV

SEQ ID NO: 6637 - protein, 24 aa, Artificial Sequence
  Cyclic GFR-binding peptide
  MOD_RES (18)..(19): Xaa is C or S
TKGIFYLISIANLDQSVXXPSASA

SEQ ID NO: 6638 - protein, 25 aa, Artificial Sequence
  Cyclic GFR-binding peptide
  MOD_RES (19)..(20): Xaa is C or S
KENEDYYLMSTASLETPVXXAKPIK

SEQ ID NO: 6639 - protein, 20 aa, Artificial Sequence
  Cyclic GFR-binding peptide
FIPKKRVIELYLVSIASLQV

SEQ ID NO: 6640 - protein, 13 aa, Artificial Sequence
  Cyclic GFR-binding peptide
YYLISTASLDQPV

SEQ ID NO: 6641 - protein, 27 aa, Artificial Sequence
  Cyclic GFR-binding peptide
  MOD_RES (21)..(21): Xaa is C or S
IVNSSDDLYLVSIASLKTPAXTPKTVH

SEQ ID NO: 6642 - protein, 20 aa, Artificial Sequence
  Cyclic GFR-binding peptide
  MOD_RES (14)..(15): Xaa is C or S
FYLISIANLDQSVXXPSASA

SEQ ID NO: 6643 - protein, 21 aa, Artificial Sequence
  Cyclic GFR-binding peptide
  MOD_RES (15)..(16): Xaa is C or S
ILYLISIASLDQSVXXPSASA

SEQ ID NO: 6644 - protein, 17 aa, Artificial Sequence
  Cyclic GFR-binding peptide
VKPTRGVYYLISTASLD

SEQ ID NO: 6645 - protein, 14 aa, Artificial Sequence
  Cyclic GFR-binding peptide
  MOD_RES (14)..(14): Xaa is C or S
LYLVSIASLQTPAX

SEQ ID NO: 6646 - protein, 18 aa, Artificial Sequence
  Cyclic GFR-binding peptide
  MOD_RES (14)..(15): Xaa is C or S
FYLISIANLDQPVXXPSA

SEQ ID NO: 6647 - protein, 20 aa, Artificial Sequence
  Cyclic GFR-binding peptide
  MOD_RES (14)..(15): Xaa is C or S
KYLISIPSLDQSVXXPSASA

SEQ ID NO: 6648 - protein, 15 aa, Artificial Sequence
  Cyclic GFR-binding peptide
  MOD_RES (14)..(15): Xaa is C or S
YYLMSTASLETPVXX

SEQ ID NO: 6649 - protein, 18 aa, Artificial Sequence
  Cyclic GFR-binding peptide
IVNSSDDKYLVSIPSLKT

SEQ ID NO: 6650 - protein, 24 aa, Artificial Sequence
  Cyclic GFR-binding peptide
  MOD_RES (18)..(19): Xaa is C or S
TRGVYYLISTASLDQPVXXPSASA

SEQ ID NO: 6651 - protein, 13 aa, Artificial Sequence
  Cyclic GFR-binding peptide
KYLISIPSLDQSV

SEQ ID NO: 6652 - protein, 16 aa, Artificial Sequence
  Cyclic GFR-binding peptide
  MOD_RES (14)..(15): Xaa is C or S
FYLISIANLDQPVXXP

SEQ ID NO: 6653 - protein, 14 aa, Artificial Sequence
  Cyclic GFR-binding peptide
  MOD_RES (14)..(14): Xaa is C or S
YYLVSTASLQTPAX

SEQ ID NO: 6654 - protein, 16 aa, Artificial Sequence
  Cyclic GFR-binding peptide
  MOD_RES (16)..(16): Xaa is C or S
YYLVSTASLQVQTPRX

SEQ ID NO: 6655 - protein, 16 aa, Artificial Sequence
  Cyclic GFR-binding peptide
VVKDYEDKYLMSIPSL

SEQ ID NO: 6656 - protein, 19 aa, Artificial Sequence
  Cyclic GFR-binding peptide
IKPTKGILYLISIASLDQS

SEQ ID NO: 6657 - protein, 18 aa, Artificial Sequence
  Cyclic GFR-binding peptide
IKPTKGIKYLISIPSLDQ

SEQ ID NO: 6658 - protein, 16 aa, Artificial Sequence
  Cyclic GFR-binding peptide
  MOD_RES (14)..(15): Xaa is C or S
KYLVSIPSLQTPAXXP

SEQ ID NO: 6659 - protein, 15 aa, Artificial Sequence
  Cyclic GFR-binding peptide
TPVGMDDFYLVSIAN

SEQ ID NO: 6660 - protein, 18 aa, Artificial Sequence
  Cyclic GFR-binding peptide
VVKENEDFYLMSIANLET

SEQ ID NO: 6661 - protein, 17 aa, Artificial Sequence
  Cyclic GFR-binding peptide
TPVGMDDYYLVSTASLK

SEQ ID NO: 6662 - protein, 19 aa, Artificial Sequence
  Cyclic GFR-binding peptide
IKPTKGIFYLISIANLDQS

SEQ ID NO: 6663 - protein, 20 aa, Artificial Sequence
  Cyclic GFR-binding peptide
  MOD_RES (14)..(14): Xaa is C or S
YYLVSTASLKTPAXTPKTVH

SEQ ID NO: 6664 - protein, 14 aa, Artificial Sequence
  Cyclic GFR-binding peptide
KYLVSIPSLQVQTP

SEQ ID NO: 6665 - protein, 16 aa, Artificial Sequence
  Cyclic GFR-binding peptide
  MOD_RES (14)..(15): Xaa is C or S
FYLISIANLAQPVXXP

SEQ ID NO: 6666 - protein, 14 aa, Artificial Sequence
  Cyclic GFR-binding peptide
  MOD_RES (14)..(14): Xaa is C or S
KYLVSIPSLKTPAX

SEQ ID NO: 6667 - protein, 22 aa, Artificial Sequence
  Cyclic GFR-binding peptide
  MOD_RES (16)..(17): Xaa is C or S
GIYYLISTASLDQSVXXPSASA

SEQ ID NO: 6668 - protein, 15 aa, Artificial Sequence
  Cyclic GFR-binding peptide
  MOD_RES (14)..(15): Xaa is C or S
LYLISIASLDQSVXX

SEQ ID NO: 6669 - protein, 27 aa, Artificial Sequence
  Cyclic GFR-binding peptide
  MOD_RES (21)..(22): Xaa is C or S
VKPTRGVYYLISTASLDQPVXXPSASA

SEQ ID NO: 6670 - protein, 15 aa, Artificial Sequence
  Cyclic GFR-binding peptide
VKPKRGVKYLISIPS

SEQ ID NO: 6671 - protein, 26 aa, Artificial Sequence
  Cyclic GFR-binding peptide
  MOD_RES (20)..(21): Xaa is C or S
KPTKGILYLISIASLDQSVXXPSASA

SEQ ID NO: 6672 - protein, 22 aa, Artificial Sequence
  Cyclic GFR-binding peptide
  MOD_RES (16)..(17): Xaa is C or S
GVFYLISIANLDQPVXXPSASA

SEQ ID NO: 6673 - protein, 22 aa, Artificial Sequence
  Cyclic GFR-binding peptide
  MOD_RES (16)..(16): Xaa is C or S
DDYYLVSTASLKTPAXTPKTVH

SEQ ID NO: 6674 - protein, 23 aa, Artificial Sequence
  Cyclic GFR-binding peptide
  MOD_RES (17)..(18): Xaa is C or S
KGIYYLISTASLDQSVXXPSASA

SEQ ID NO: 6675 - protein, 18 aa, Artificial Sequence
  Cyclic GFR-binding peptide
FIPKKRVIEYYLVSTASL

SEQ ID NO: 6676 - protein, 18 aa, Artificial Sequence
  Cyclic GFR-binding peptide
  MOD_RES (14)..(15): Xaa is C or S
YYLISTASLDQSVXXPSA

SEQ ID NO: 6677 - protein, 19 aa, Artificial Sequence
  Cyclic GFR-binding peptide
IVNNSSDKYLVSIPSLKTP

SEQ ID NO: 6678 - protein, 19 aa, Artificial Sequence
  Cyclic GFR-binding peptide
VVKDYEDKYLMSIPSLETP

SEQ ID NO: 6679 - protein, 18 aa, Artificial Sequence
  Cyclic GFR-binding peptide
  MOD_RES (14)..(15): Xaa is C or S
YYLMSTASLETPVXXAKP

SEQ ID NO: 6680 - protein, 17 aa, Artificial Sequence
  Cyclic GFR-binding peptide
  MOD_RES (14)..(15): Xaa is C or S
KYLVSIPSLKTPAXXAK

SEQ ID NO: 6681 - protein, 21 aa, Artificial Sequence
  Cyclic GFR-binding peptide
  MOD_RES (15)..(16): Xaa is C or S
DYYLVSTASLKTPVXXAKGVK

SEQ ID NO: 6682 - protein, 13 aa, Artificial Sequence
  Cyclic GFR-binding peptide
KYLISIPSLAQPV

SEQ ID NO: 6683 - protein, 13 aa, Artificial Sequence
  Cyclic GFR-binding peptide
YYLVSTASLQVQT

SEQ ID NO: 6684 - protein, 15 aa, Artificial Sequence
  Cyclic GFR-binding peptide
  MOD_RES (14)..(15): Xaa is C or S
KYLVSIPSLQTPAXX

SEQ ID NO: 6685 - protein, 19 aa, Artificial Sequence
  Cyclic GFR-binding peptide
  MOD_RES (14)..(15): Xaa is C or S
LYLISIASLAQPVXXPAAS

SEQ ID NO: 6686 - protein, 15 aa, Artificial Sequence
  Cyclic GFR-binding peptide
  MOD_RES (14)..(15): Xaa is C or S
FYLMSIANLETPVXX

SEQ ID NO: 6687 - protein, 16 aa, Artificial Sequence
  Cyclic GFR-binding peptide
VVKENEDYYLMSTASL

SEQ ID NO: 6688 - protein, 27 aa, Artificial Sequence
  Cyclic GFR-binding peptide
  MOD_RES (21)..(22): Xaa is C or S
IVNSSDDYYLVSTASLKTPAXXPKPVY

SEQ ID NO: 6689 - protein, 20 aa, Artificial Sequence
  Cyclic GFR-binding peptide
  MOD_RES (14)..(15): Xaa is C or S
LYLISIASLDQPVXXPSASA

SEQ ID NO: 6690 - protein, 19 aa, Artificial Sequence
  Cyclic GFR-binding peptide
  MOD_RES (14)..(14): Xaa is C or S
KYLVSIPSLKTPAXTPKTV

SEQ ID NO: 6691 - protein, 15 aa, Artificial Sequence
  Cyclic GFR-binding peptide
  MOD_RES (14)..(14): Xaa is C or S
LYLVSIASLKTPAXT

SEQ ID NO: 6692 - protein, 26 aa, Artificial Sequence
  Cyclic GFR-binding peptide
  MOD_RES (20)..(21): Xaa is C or S
VKENEDFYLMSIANLETPVXXAKPIK

SEQ ID NO: 6693 - protein, 18 aa, Artificial Sequence
  Cyclic GFR-binding peptide
  MOD_RES (14)..(15): Xaa is C or S
KYLVSIPSLKTPAXXAKP

SEQ ID NO: 6694 - protein, 25 aa, Artificial Sequence
  Cyclic GFR-binding peptide
  MOD_RES (19)..(20): Xaa is C or S
NSSDDYYLVSTASLQTPAXXPKPVT

SEQ ID NO: 6695 - protein, 15 aa, Artificial Sequence
  Cyclic GFR-binding peptide
KYLVSIPSLQVQTPR

SEQ ID NO: 6696 - protein, 23 aa, Artificial Sequence
  Cyclic GFR-binding peptide
  MOD_RES (17)..(18): Xaa is C or S
YEDFYLMSIANLETPVXXAKPIS

SEQ ID NO: 6697 - protein, 19 aa, Artificial Sequence
  Cyclic GFR-binding peptide
  MOD_RES (14)..(15): Xaa is C or S
YYLVSTASLKTPAXXPKPV

SEQ ID NO: 6698 - protein, 18 aa, Artificial Sequence
  Cyclic GFR-binding peptide
VKPTRGVLYLISIASLDQ

SEQ ID NO: 6699 - protein, 20 aa, Artificial Sequence
  Cyclic GFR-binding peptide
  MOD_RES (14)..(15): Xaa is C or S
KYLMSIPSLETPVXXAKPIK

SEQ ID NO: 6700 - protein, 26 aa, Artificial Sequence
  Cyclic GFR-binding peptide
  MOD_RES (20)..(21): Xaa is C or S
PVGMDDFYLVSIANLKTPVXXAKGVK

SEQ ID NO: 6701 - protein, 16 aa, Artificial Sequence
  Cyclic GFR-binding peptide
IVNNSSDLYLVSIASL

SEQ ID NO: 6702 - protein, 23 aa, Artificial Sequence
  Cyclic GFR-binding peptide
  MOD_RES (19)..(19): Xaa is C or S
VIEKYLVSIPSLQVQTPRXQVNR

SEQ ID NO: 6703 - protein, 23 aa, Artificial Sequence
  Cyclic GFR-binding peptide
  MOD_RES (17)..(18): Xaa is C or S
RGVLYLISIASLDQPVXXPSASA

SEQ ID NO: 6704 - protein, 20 aa, Artificial Sequence
  Cyclic GFR-binding peptide
  MOD_RES (14)..(15): Xaa is C or S
YYLISTASLDQSVXXPSASA

SEQ ID NO: 6705 - protein, 15 aa, Artificial Sequence
  Cyclic GFR-binding peptide
VKPKRGVLYLISIAS

SEQ ID NO: 6706 - protein, 25 aa, Artificial Sequence
  Cyclic GFR-binding peptide
  MOD_RES (19)..(20): Xaa is C or S
NSSDDKYLVSIPSLQTPAXXPKPVT

SEQ ID NO: 6707 - protein, 16 aa, Artificial Sequence
  Cyclic GFR-binding peptide
IVNSSDDYYLVSTASL

SEQ ID NO: 6708 - protein, 20 aa, Artificial Sequence
  Cyclic GFR-binding peptide
  MOD_RES (14)..(15): Xaa is C or S
YYLMSTASLETPVXXAKPIK

SEQ ID NO: 6709 - protein, 16 aa, Artificial Sequence
  Cyclic GFR-binding peptide
  MOD_RES (14)..(15): Xaa is C or S
FYLISIANLDQSVXXP

SEQ ID NO: 6710 - protein, 14 aa, Artificial Sequence
  Cyclic GFR-binding peptide
  MOD_RES (14)..(14): Xaa is C or S
FYLMSIANLETPVX

SEQ ID NO: 6711 - protein, 13 aa, Artificial Sequence
  Cyclic GFR-binding peptide
KYLVSIPSLQVQT

SEQ ID NO: 6712 - protein, 17 aa, Artificial Sequence
  Cyclic GFR-binding peptide
  MOD_RES (14)..(15): Xaa is C or S
LYLISIASLDQSVXXPS

SEQ ID NO: 6713 - protein, 20 aa, Artificial Sequence
  Cyclic GFR-binding peptide
  MOD_RES (14)..(15): Xaa is C or S
FYLISIANLDQPVXXPSASA

SEQ ID NO: 6714 - protein, 25 aa, Artificial Sequence
  Cyclic GFR-binding peptide
  MOD_RES (19)..(20): Xaa is C or S
KDYEDKYLMSIPSLETPVXXAKPIS

SEQ ID NO: 6715 - protein, 14 aa, Artificial Sequence
  Cyclic GFR-binding peptide
  MOD_RES (14)..(14): Xaa is C or S
FYLVSIANLKTPVX

SEQ ID NO: 6716 - protein, 16 aa, Artificial Sequence
  Cyclic GFR-binding peptide
IVNNSSDKYLVSIPSL

SEQ ID NO: 6717 - protein, 15 aa, Artificial Sequence
  Cyclic GFR-binding peptide
  MOD_RES (14)..(15): Xaa is C or S
YYLVSTASLQTPAXX

SEQ ID NO: 6718 - protein, 17 aa, Artificial Sequence
  Cyclic GFR-binding peptide
IKPTKGIYYLISTASLD

SEQ ID NO: 6719 - protein, 14 aa, Artificial Sequence
  Cyclic GFR-binding peptide
  MOD_RES (14)..(14): Xaa is C or S
LYLVSIASLKTPVX

SEQ ID NO: 6720 - protein, 19 aa, Artificial Sequence
  Cyclic GFR-binding peptide
IVNSSDDYYLVSTASLQTP

SEQ ID NO: 6721 - protein, 15 aa, Artificial Sequence
  Cyclic GFR-binding peptide
IKPTKGIKYLISIPS

SEQ ID NO: 6722 - protein, 19 aa, Artificial Sequence
  Cyclic GFR-binding peptide
IVNSSDDYYLVSTASLKTP

SEQ ID NO: 6723 - protein, 18 aa, Artificial Sequence
  Cyclic GFR-binding peptide
IKPTKGIFYLISIANLDQ

SEQ ID NO: 6724 - protein, 20 aa, Artificial Sequence
  Cyclic GFR-binding peptide
  MOD_RES (14)..(14): Xaa is C or S
KYLVSIPSLKTPAXTPKTVH

SEQ ID NO: 6725 - protein, 24 aa, Artificial Sequence
  Cyclic GFR-binding peptide
  MOD_RES (18)..(19): Xaa is C or S
TKGILYLISIASLDQSVXXPSASA

SEQ ID NO: 6726 - protein, 19 aa, Artificial Sequence
  Cyclic GFR-binding peptide
  MOD_RES (14)..(14): Xaa is C or S
YYLVSTASLKTPAXTPKTV

SEQ ID NO: 6727 - protein, 16 aa, Artificial Sequence
  Cyclic GFR-binding peptide
  MOD_RES (14)..(15): Xaa is C or S
LYLISIASLDQSVXXP

SEQ ID NO: 6728 - protein, 19 aa, Artificial Sequence
  Cyclic GFR-binding peptide
IVNNSSDLYLVSIASLKTP

SEQ ID NO: 6729 - protein, 24 aa, Artificial Sequence
  Cyclic GFR-binding peptide
  MOD_RES (18)..(19): Xaa is C or S
SSDDYYLVSTASLKTPAXXPKPVY

SEQ ID NO: 6730 - protein, 19 aa, Artificial Sequence
  Cyclic GFR-binding peptide
  MOD_RES (16)..(16): Xaa is C or S
KYLVSIPSLQVQTPRXQVN

SEQ ID NO: 6731 - protein, 22 aa, Artificial Sequence
  Cyclic GFR-binding peptide
  MOD_RES (16)..(17): Xaa is C or S
DDYYLVSTASLKTPVXXAKGVK

SEQ ID NO: 6732 - protein, 23 aa, Artificial Sequence
  Cyclic GFR-binding peptide
  MOD_RES (19)..(19): Xaa is C or S
VIEYYLVSTASLQVQTPRXQVNR

SEQ ID NO: 6733 - protein, 21 aa, Artificial Sequence
  Cyclic GFR-binding peptide
  MOD_RES (15)..(16): Xaa is C or S
IFYLISIANLDQSVXXPSASA

SEQ ID NO: 6734 - protein, 27 aa, Artificial Sequence
  Cyclic GFR-binding peptide
  MOD_RES (21)..(22): Xaa is C or S
IKPTKGIYYLISTASLDQSVXXPSASA

SEQ ID NO: 6735 - protein, 17 aa, Artificial Sequence
  Cyclic GFR-binding peptide
  MOD_RES (14)..(15): Xaa is C or S
FYLISIANLDQSVXXPS

SEQ ID NO: 6736 - protein, 19 aa, Artificial Sequence
  Cyclic GFR-binding peptide
VVKDYEDFYLMSIANLETP

SEQ ID NO: 6737 - protein, 22 aa, Artificial Sequence
  Cyclic GFR-binding peptide
  MOD_RES (16)..(17): Xaa is C or S
EDFYLMSIANLETPVXXAKPIS

SEQ ID NO: 6738 - protein, 18 aa, Artificial Sequence
  Cyclic GFR-binding peptide
  MOD_RES (14)..(15): Xaa is C or S
KYLMSIPSLETPVXXAKP

SEQ ID NO: 6739 - protein, 27 aa, Artificial Sequence
  Cyclic GFR-binding peptide
  MOD_RES (21)..(22): Xaa is C or S
TPVGMDDFYLVSIANLKTPVXXAKGVK

SEQ ID NO: 6740 - protein, 29 aa, Artificial Sequence
  Cyclic GFR-binding peptide
  MOD_RES (25)..(25): Xaa is C or S
FIPKKRVIEKYLVSIPSLQVQTPRXQVNR

SEQ ID NO: 6741 - protein, 18 aa, Artificial Sequence
  Cyclic GFR-binding peptide
  MOD_RES (14)..(15): Xaa is C or S
KYLISIPSLDQSVXXPSA

SEQ ID NO: 6742 - protein, 19 aa, Artificial Sequence
  Cyclic GFR-binding peptide
  MOD_RES (14)..(15): Xaa is C or S
YYLISTASLDQSVXXPSAS

SEQ ID NO: 6743 - protein, 27 aa, Artificial Sequence
  Cyclic GFR-binding peptide
  MOD_RES (21)..(22): Xaa is C or S
TPVGMDDLYLVSIASLKTPVXXAKGVK

SEQ ID NO: 6744 - protein, 28 aa, Artificial Sequence
  Cyclic GFR-binding peptide
  MOD_RES (24)..(24): Xaa is C or S
IPKKRVIEKYLVSIPSLQVQTPRXQVNR

SEQ ID NO: 6745 - protein, 21 aa, Artificial Sequence
  Cyclic GFR-binding peptide
  MOD_RES (15)..(16): Xaa is C or S
IKYLISIPSLDQSVXXPSASA

SEQ ID NO: 6746 - protein, 18 aa, Artificial Sequence
  Cyclic GFR-binding peptide
VKPKRGVYYLISTASLAQ

SEQ ID NO: 6747 - protein, 22 aa, Artificial Sequence
  Cyclic GFR-binding peptide
  MOD_RES (16)..(17): Xaa is C or S
GVLYLISIASLAQPVXXPAASA

SEQ ID NO: 6748 - protein, 16 aa, Artificial Sequence
  Cyclic GFR-binding peptide
TPVGMDDFYLVSIANL

SEQ ID NO: 6749 - protein, 25 aa, Artificial Sequence
  Cyclic GFR-binding peptide
  MOD_RES (19)..(20): Xaa is C or S
NSSDDLYLVSIASLKTPAXXPKPVY

SEQ ID NO: 6750 - protein, 26 aa, Artificial Sequence
  Cyclic GFR-binding peptide
  MOD_RES (20)..(21): Xaa is C or S
VNSSDDYYLVSTASLQTPAXXPKPVT

SEQ ID NO: 6751 - protein, 24 aa, Artificial Sequence
  Cyclic GFR-binding peptide
  MOD_RES (18)..(19): Xaa is C or S
DYEDKYLMSIPSLETPVXXAKPIS

SEQ ID NO: 6752 - protein, 21 aa, Artificial Sequence
  Cyclic GFR-binding peptide
  MOD_RES (15)..(16): Xaa is C or S
VKYLISIPSLDQPVXXPSASA

SEQ ID NO: 6753 - protein, 17 aa, Artificial Sequence
  Cyclic GFR-binding peptide
VVKENEDKYLMSIPSLE

SEQ ID NO: 6754 - protein, 13 aa, Artificial Sequence
  Cyclic GFR-binding peptide
YYLISTASLDQSV

SEQ ID NO: 6755 - protein, 22 aa, Artificial Sequence
  Cyclic GFR-binding peptide
  MOD_RES (16)..(17): Xaa is C or S
SDFYLVSIANLKTPAXXAKPVA

SEQ ID NO: 6756 - protein, 22 aa, Artificial Sequence
  Cyclic GFR-binding peptide
  MOD_RES (16)..(17): Xaa is C or S
DDFYLVSIANLKTPVXXAKGVK

SEQ ID NO: 6757 - protein, 20 aa, Artificial Sequence
  Cyclic GFR-binding peptide
  MOD_RES (14)..(15): Xaa is C or S
YYLVSTASLQTPAXXPKPVT

SEQ ID NO: 6758 - protein, 23 aa, Artificial Sequence
  Cyclic GFR-binding peptide
  MOD_RES (17)..(18): Xaa is C or S
NEDYYLMSTASLETPVXXAKPIK

SEQ ID NO: 6759 - protein, 22 aa, Artificial Sequence
  Cyclic GFR-binding peptide
  MOD_RES (16)..(17): Xaa is C or S
GVYYLISTASLAQPVXXPAASA

SEQ ID NO: 6760 - protein, 20 aa, Artificial Sequence
  Cyclic GFR-binding peptide
  MOD_RES (16)..(16): Xaa is C or S
YYLVSTASLQVQTPRXQVNR

SEQ ID NO: 6761 - protein, 23 aa, Artificial Sequence
  Cyclic GFR-binding peptide
  MOD_RES (17)..(18): Xaa is C or S
MDDLYLVSIASLKTPVXXAKGVK

SEQ ID NO: 6762 - protein, 18 aa, Artificial Sequence
  Cyclic GFR-binding peptide
IVNNSSDFYLVSIANLKT

SEQ ID NO: 6763 - protein, 16 aa, Artificial Sequence
  Cyclic GFR-binding peptide
VVKENEDFYLMSIANL

SEQ ID NO: 6764 - protein, 16 aa, Artificial Sequence
  Cyclic GFR-binding peptide
  MOD_RES (14)..(15): Xaa is C or S
LYLISIASLAQPVXXP

SEQ ID NO: 6765 - protein, 16 aa, Artificial Sequence
  Cyclic GFR-binding peptide
  MOD_RES (14)..(15): Xaa is C or S
LYLVSIASLQTPAXXP

SEQ ID NO: 6766 - protein, 23 aa, Artificial Sequence
  Cyclic GFR-binding peptide
  MOD_RES (17)..(18): Xaa is C or S
RGVKYLISIPSLAQPVXXPAASA

SEQ ID NO: 6767 - protein, 22 aa, Artificial Sequence
  Cyclic GFR-binding peptide
  MOD_RES (16)..(16): Xaa is C or S
DDLYLVSIASLKTPAXTPKTVH

SEQ ID NO: 6768 - protein, 18 aa, Artificial Sequence
  Cyclic GFR-binding peptide
IVNNSSDLYLVSIASLKT

SEQ ID NO: 6769 - protein, 15 aa, Artificial Sequence
  Cyclic GFR-binding peptide
VVKENEDKYLMSIPS

SEQ ID NO: 6770 - protein, 25 aa, Artificial Sequence
  Cyclic GFR-binding peptide
  MOD_RES (19)..(20): Xaa is C or S
PTRGVYYLISTASLDQPVXXPSASA

SEQ ID NO: 6771 - protein, 15 aa, Artificial Sequence
  Cyclic GFR-binding peptide
VVKDYEDYYLMSTAS

SEQ ID NO: 6772 - protein, 19 aa, Artificial Sequence
  Cyclic GFR-binding peptide
  MOD_RES (14)..(15): Xaa is C or S
YYLVSTASLQTPAXXPKPV

SEQ ID NO: 6773 - protein, 22 aa, Artificial Sequence
  Cyclic GFR-binding peptide
  MOD_RES (16)..(17): Xaa is C or S
GIFYLISIANLDQSVXXPSASA

SEQ ID NO: 6774 - protein, 14 aa, Artificial Sequence
  Cyclic GFR-binding peptide
FYLVSIANLQVQTP

SEQ ID NO: 6775 - protein, 26 aa, Artificial Sequence
  Cyclic GFR-binding peptide
  MOD_RES (20)..(21): Xaa is C or S
VKDYEDFYLMSIANLETPVXXAKPIS

SEQ ID NO: 6776 - protein, 26 aa, Artificial Sequence
  Cyclic GFR-binding peptide
  MOD_RES (20)..(20): Xaa is C or S
VNSSDDKYLVSIPSLKTPAXTPKTVH

SEQ ID NO: 6777 - protein, 17 aa, Artificial Sequence
  Cyclic GFR-binding peptide
  MOD_RES (14)..(15): Xaa is C or S
FYLISIANLDQPVXXPS

SEQ ID NO: 6778 - protein, 16 aa, Artificial Sequence
  Cyclic GFR-binding peptide
  MOD_RES (14)..(15): Xaa is C or S
LYLVSIASLKTPAXXA

SEQ ID NO: 6779 - protein, 18 aa, Artificial Sequence
  Cyclic GFR-binding peptide
  MOD_RES (14)..(15): Xaa is C or S
LYLISIASLDQPVXXPSA

SEQ ID NO: 6780 - protein, 22 aa, Artificial Sequence
  Cyclic GFR-binding peptide
  MOD_RES (16)..(17): Xaa is C or S
DDLYLVSIASLKTPAXXPKPVY

SEQ ID NO: 6781 - protein, 18 aa, Artificial Sequence
  Cyclic GFR-binding peptide
  MOD_RES (14)..(15): Xaa is C or S
LYLVSIASLKTPVXXAKG

SEQ ID NO: 6782 - protein, 23 aa, Artificial Sequence
  Cyclic GFR-binding peptide
  MOD_RES (17)..(18): Xaa is C or S
SSDFYLVSIANLKTPAXXAKPVA

SEQ ID NO: 6783 - protein, 21 aa, Artificial Sequence
  Cyclic GFR-binding peptide
  MOD_RES (15)..(15): Xaa is C or S
DYYLVSTASLKTPAXTPKTVH

SEQ ID NO: 6784 - protein, 24 aa, Artificial Sequence
  Cyclic GFR-binding peptide
  MOD_RES (18)..(19): Xaa is C or S
TKGIKYLISIPSLDQSVXXPSASA

SEQ ID NO: 6785 - protein, 27 aa, Artificial Sequence
  Cyclic GFR-binding peptide
  MOD_RES (21)..(22): Xaa is C or S
TPVGMDDYYLVSTASLKTPVXXAKGVK

SEQ ID NO: 6786 - protein, 18 aa, Artificial Sequence
  Cyclic GFR-binding peptide
  MOD_RES (16)..(16): Xaa is C or S
YYLVSTASLQVQTPRXQV

SEQ ID NO: 6787 - protein, 18 aa, Artificial Sequence
  Cyclic GFR-binding peptide
  MOD_RES (14)..(15): Xaa is C or S
FYLMSIANLETPVXXAKP

SEQ ID NO: 6788 - protein, 13 aa, Artificial Sequence
  Cyclic GFR-binding peptide
YYLISTASLAQPV

SEQ ID NO: 6789 - protein, 17 aa, Artificial Sequence
  Cyclic GFR-binding peptide
TPVGMDDLYLVSIASLK

SEQ ID NO: 6790 - protein, 18 aa, Artificial Sequence
  Cyclic GFR-binding peptide
VVKDYEDKYLMSIPSLET

SEQ ID NO: 6791 - protein, 18 aa, Artificial Sequence
  Cyclic GFR-binding peptide
IKPTKGILYLISIASLDQ

SEQ ID NO: 6792 - protein, 16 aa, Artificial Sequence
  Cyclic GFR-binding peptide
TPVGMDDLYLVSIASL

SEQ ID NO: 6793 - protein, 17 aa, Artificial Sequence
  Cyclic GFR-binding peptide
  MOD_RES (16)..(16): Xaa is C or S
YYLVSTASLQVQTPRXQ

SEQ ID NO: 6794 - protein, 17 aa, Artificial Sequence
  Cyclic GFR-binding peptide
  MOD_RES (14)..(15): Xaa is C or S
KYLISIPSLAQPVXXPA

SEQ ID NO: 6795 - protein, 24 aa, Artificial Sequence
  Cyclic GFR-binding peptide
  MOD_RES (18)..(18): Xaa is C or S
SSDDYYLVSTASLKTPAXTPKTVH

SEQ ID NO: 6796 - protein, 25 aa, Artificial Sequence
  Cyclic GFR-binding peptide
  MOD_RES (19)..(20): Xaa is C or S
PTKGIFYLISIANLDQSVXXPSASA

SEQ ID NO: 6797 - protein, 18 aa, Artificial Sequence
  Cyclic GFR-binding peptide
  MOD_RES (14)..(15): Xaa is C or S
FYLVSIANLKTPVXXAKG

SEQ ID NO: 6798 - protein, 27 aa, Artificial Sequence
  Cyclic GFR-binding peptide
  MOD_RES (21)..(22): Xaa is C or S
IKPTKGILYLISIASLDQSVXXPSASA

SEQ ID NO: 6799 - protein, 17 aa, Artificial Sequence
  Cyclic GFR-binding peptide
FIPKKRVIEYYLVSTAS

SEQ ID NO: 6800 - protein, 15 aa, Artificial Sequence
  Cyclic GFR-binding peptide
  MOD_RES (14)..(15): Xaa is C or S
YYLISTASLAQPVXX

SEQ ID NO: 6801 - protein, 21 aa, Artificial Sequence
  Cyclic GFR-binding peptide
  MOD_RES (15)..(16): Xaa is C or S
VFYLISIANLDQPVXXPSASA

SEQ ID NO: 6802 - protein, 17 aa, Artificial Sequence
  Cyclic GFR-binding peptide
  MOD_RES (14)..(15): Xaa is C or S
FYLISIANLAQPVXXPA

SEQ ID NO: 6803 - protein, 18 aa, Artificial Sequence
  Cyclic GFR-binding peptide
  MOD_RES (14)..(15): Xaa is C or S
LYLISIASLAQPVXXPAA

SEQ ID NO: 6804 - protein, 26 aa, Artificial Sequence
  Cyclic GFR-binding peptide
  MOD_RES (20)..(21): Xaa is C or S
VNSSDDLYLVSIASLQTPAXXPKPVT

SEQ ID NO: 6805 - protein, 18 aa, Artificial Sequence
  Cyclic GFR-binding peptide
VKPTRGVYYLISTASLDQ

SEQ ID NO: 6806 - protein, 26 aa, Artificial Sequence
  Cyclic GFR-binding peptide
  MOD_RES (20)..(21): Xaa is C or S
VNSSDDYYLVSTASLKTPAXXPKPVY

SEQ ID NO: 6807 - protein, 19 aa, Artificial Sequence
  Cyclic GFR-binding peptide
IVNNSSDFYLVSIANLKTP

SEQ ID NO: 6808 - protein, 20 aa, Artificial Sequence
  Cyclic GFR-binding peptide
  MOD_RES (14)..(14): Xaa is C or S
LYLVSIASLKTPAXTPKTVH

SEQ ID NO: 6809 - protein, 18 aa, Artificial Sequence
  Cyclic GFR-binding peptide
  MOD_RES (14)..(15): Xaa is C or S
KYLISIPSLDQPVXXPSA

SEQ ID NO: 6810 - protein, 13 aa, Artificial Sequence
  Cyclic GFR-binding peptide
LYLVSIASLKTPA

SEQ ID NO: 6811 - protein, 19 aa, Artificial Sequence
  Cyclic GFR-binding peptide
  MOD_RES (14)..(15): Xaa is C or S
YYLISTASLAQPVXXPAAS

SEQ ID NO: 6812 - protein, 21 aa, Artificial Sequence
  Cyclic GFR-binding peptide
FIPKKRVIEYYLVSTASLQVQ

SEQ ID NO: 6813 - protein, 25 aa, Artificial Sequence
  Cyclic GFR-binding peptide
  MOD_RES (21)..(21): Xaa is C or S
KRVIEFYLVSIANLQVQTPRXQVNR

SEQ ID NO: 6814 - protein, 17 aa, Artificial Sequence
  Cyclic GFR-binding peptide
  MOD_RES (14)..(15): Xaa is C or S
FYLVSIANLKTPAXXAK

SEQ ID NO: 6815 - protein, 23 aa, Artificial Sequence
  Cyclic GFR-binding peptide
  MOD_RES (17)..(18): Xaa is C or S
MDDYYLVSTASLKTPVXXAKGVK

SEQ ID NO: 6816 - protein, 17 aa, Artificial Sequence
  Cyclic GFR-binding peptide
  MOD_RES (14)..(15): Xaa is C or S
KYLISIPSLDQPVXXPS

SEQ ID NO: 6817 - protein, 26 aa, Artificial Sequence
  Cyclic GFR-binding peptide
  MOD_RES (20)..(21): Xaa is C or S
KPTRGVLYLISIASLDQPVXXPSASA

SEQ ID NO: 6818 - protein, 17 aa, Artificial Sequence
  Cyclic GFR-binding peptide
VVKDYEDYYLMSTASLE

SEQ ID NO: 6819 - protein, 19 aa, Artificial Sequence
  Cyclic GFR-binding peptide
  MOD_RES (14)..(15): Xaa is C or S
YYLISTASLDQPVXXPSAS

SEQ ID NO: 6820 - protein, 23 aa, Artificial Sequence
  Cyclic GFR-binding peptide
  MOD_RES (17)..(18): Xaa is C or S
YEDYYLMSTASLETPVXXAKPIS

SEQ ID NO: 6821 - protein, 15 aa, Artificial Sequence
  Cyclic GFR-binding peptide
TPVGMDDLYLVSIAS

SEQ ID NO: 6822 - protein, 16 aa, Artificial Sequence
  Cyclic GFR-binding peptide
  MOD_RES (14)..(15): Xaa is C or S
KYLISIPSLAQPVXXP

SEQ ID NO: 6823 - protein, 22 aa, Artificial Sequence
  Cyclic GFR-binding peptide
  MOD_RES (16)..(17): Xaa is C or S
GILYLISIASLDQSVXXPSASA

SEQ ID NO: 6824 - protein, 16 aa, Artificial Sequence
  Cyclic GFR-binding peptide
  MOD_RES (14)..(15): Xaa is C or S
YYLVSTASLKTPAXXP

SEQ ID NO: 6825 - protein, 26 aa, Artificial Sequence
  Cyclic GFR-binding peptide
  MOD_RES (20)..(21): Xaa is C or S
KPKRGVFYLISIANLAQPVXXPAASA

SEQ ID NO: 6826 - protein, 22 aa, Artificial Sequence
  Cyclic GFR-binding peptide
  MOD_RES (16)..(17): Xaa is C or S
SDLYLVSIASLKTPAXXAKPVA

SEQ ID NO: 6827 - protein, 23 aa, Artificial Sequence
  Cyclic GFR-binding peptide
  MOD_RES (17)..(18): Xaa is C or S
SSDLYLVSIASLKTPAXXAKPVA

SEQ ID NO: 6828 - protein, 17 aa, Artificial Sequence
  Cyclic GFR-binding peptide
  MOD_RES (14)..(15): Xaa is C or S
FYLVSIANLKTPVXXAK

SEQ ID NO: 6829 - protein, 15 aa, Artificial Sequence
  Cyclic GFR-binding peptide
FYLVSIANLQVQTPR

SEQ ID NO: 6830 - protein, 27 aa, Artificial Sequence
  Cyclic GFR-binding peptide
  MOD_RES (21)..(22): Xaa is C or S
IKPTKGIKYLISIPSLDQSVXXPSASA

SEQ ID NO: 6831 - protein, 22 aa, Artificial Sequence
  Cyclic GFR-binding peptide
  MOD_RES (16)..(17): Xaa is C or S
GVKYLISIPSLDQPVXXPSASA

SEQ ID NO: 6832 - protein, 15 aa, Artificial Sequence
  Cyclic GFR-binding peptide
  MOD_RES (14)..(15): Xaa is C or S
FYLISIANLDQPVXX

SEQ ID NO: 6833 - protein, 14 aa, Artificial Sequence
  Cyclic GFR-binding peptide
  MOD_RES (14)..(14): Xaa is C or S
KYLMSIPSLETPVX

SEQ ID NO: 6834 - protein, 17 aa, Artificial Sequence
  Cyclic GFR-binding peptide
  MOD_RES (14)..(15): Xaa is C or S
YYLISTASLDQSVXXPS

SEQ ID NO: 6835 - protein, 18 aa, Artificial Sequence
  Cyclic GFR-binding peptide
IVNSSDDYYLVSTASLKT

SEQ ID NO: 6836 - protein, 22 aa, Artificial Sequence
  Cyclic GFR-binding peptide
  MOD_RES (16)..(17): Xaa is C or S
GVYYLISTASLDQPVXXPSASA

SEQ ID NO: 6837 - protein, 18 aa, Artificial Sequence
  Cyclic GFR-binding peptide
IVNSSDDYYLVSTASLQT

SEQ ID NO: 6838 - protein, 21 aa, Artificial Sequence
  Cyclic GFR-binding peptide
  MOD_RES (17)..(17): Xaa is C or S
ELYLVSIASLQVQTPRXQVNR

SEQ ID NO: 6839 - protein, 17 aa, Artificial Sequence
  Cyclic GFR-binding peptide
VVKENEDFYLMSIANLE

SEQ ID NO: 6840 - protein, 17 aa, Artificial Sequence
  Cyclic GFR-binding peptide
FIPKKRVIEKYLVSIPS

SEQ ID NO: 6841 - protein, 21 aa, Artificial Sequence
  Cyclic GFR-binding peptide
FIPKKRVIEKYLVSIPSLQVQ

SEQ ID NO: 6842 - protein, 21 aa, Artificial Sequence
  Cyclic GFR-binding peptide
  MOD_RES (15)..(16): Xaa is C or S
DKYLVSIPSLKTPAXXAKPVA

SEQ ID NO: 6843 - protein, 24 aa, Artificial Sequence
  Cyclic GFR-binding peptide
  MOD_RES (18)..(19): Xaa is C or S
SSDDKYLVSIPSLQTPAXXPKPVT

SEQ ID NO: 6844 - protein, 23 aa, Artificial Sequence
  Cyclic GFR-binding peptide
  MOD_RES (17)..(17): Xaa is C or S
SDDYYLVSTASLKTPAXTPKTVH

SEQ ID NO: 6845 - protein, 14 aa, Artificial Sequence
  Cyclic GFR-binding peptide
  MOD_RES (14)..(14): Xaa is C or S
LYLISIASLDQPVX

SEQ ID NO: 6846 - protein, 16 aa, Artificial Sequence
  Cyclic GFR-binding peptide
VVKDYEDYYLMSTASL

SEQ ID NO: 6847 - protein, 15 aa, Artificial Sequence
  Cyclic GFR-binding peptide
  MOD_RES (14)..(14): Xaa is C or S
KYLVSIPSLKTPAXT

SEQ ID NO: 6848 - protein, 22 aa, Artificial Sequence
  Cyclic GFR-binding peptide
  MOD_RES (16)..(17): Xaa is C or S
EDYYLMSTASLETPVXXAKPIK

SEQ ID NO: 6849 - protein, 18 aa, Artificial Sequence
  Cyclic GFR-binding peptide
  MOD_RES (14)..(15): Xaa is C or S
LYLVSIASLKTPAXXPKP

SEQ ID NO: 6850 - protein, 18 aa, Artificial Sequence
  Cyclic GFR-binding peptide
VVKDYEDFYLMSIANLET

SEQ ID NO: 6851 - protein, 14 aa, Artificial Sequence
  Cyclic GFR-binding peptide
  MOD_RES (14)..(14): Xaa is C or S
FYLISIANLDQSVX

SEQ ID NO: 6852 - protein, 26 aa, Artificial Sequence
  Cyclic GFR-binding peptide
  MOD_RES (20)..(21): Xaa is C or S
VNSSDDKYLVSIPSLQTPAXXPKPVT

SEQ ID NO: 6853 - protein, 21 aa, Artificial Sequence
  Cyclic GFR-binding peptide
  MOD_RES (15)..(16): Xaa is C or S
DYYLMSTASLETPVXXAKPIK

SEQ ID NO: 6854 - protein, 15 aa, Artificial Sequence
  Cyclic GFR-binding peptide
  MOD_RES (14)..(15): Xaa is C or S
KYLMSIPSLETPVXX

SEQ ID NO: 6855 - protein, 26 aa, Artificial Sequence
  Cyclic GFR-binding peptide
  MOD_RES (20)..(21): Xaa is C or S
VNSSDDKYLVSIPSLKTPAXXPKPVY

SEQ ID NO: 6856 - protein, 14 aa, Artificial Sequence
  Cyclic GFR-binding peptide
  MOD_RES (14)..(14): Xaa is C or S
FYLISIANLDQPVX

SEQ ID NO: 6857 - protein, 13 aa, Artificial Sequence
  Cyclic GFR-binding peptide
FYLISIANLDQPV

SEQ ID NO: 6858 - protein, 25 aa, Artificial Sequence
  Cyclic GFR-binding peptide
  MOD_RES (21)..(21): Xaa is C or S
KRVIEKYLVSIPSLQVQTPRXQVNR

SEQ ID NO: 6859 - protein, 15 aa, Artificial Sequence
  Cyclic GFR-binding peptide
  MOD_RES (14)..(15): Xaa is C or S
YYLISTASLDQSVXX

SEQ ID NO: 6860 - protein, 15 aa, Artificial Sequence
  Cyclic GFR-binding peptide
IVNNSSDFYLVSIAN

SEQ ID NO: 6861 - protein, 22 aa, Artificial Sequence
  Cyclic GFR-binding peptide
  MOD_RES (16)..(17): Xaa is C or S
DDYYLVSTASLKTPAXXPKPVY

SEQ ID NO: 6862 - protein, 16 aa, Artificial Sequence
  Cyclic GFR-binding peptide
VVKENEDKYLMSIPSL

SEQ ID NO: 6863 - protein, 15 aa, Artificial Sequence
  Cyclic GFR-binding peptide
  MOD_RES (14)..(15): Xaa is C or S
LYLVSIASLKTPAXX

SEQ ID NO: 6864 - protein, 15 aa, Artificial Sequence
  Cyclic GFR-binding peptide
TPVGMDDYYLVSTAS

SEQ ID NO: 6865 - protein, 16 aa, Artificial Sequence
  Cyclic GFR-binding peptide
  MOD_RES (14)..(15): Xaa is C or S
FYLVSIANLKTPVXXA

SEQ ID NO: 6866 - protein, 25 aa, Artificial Sequence
  Cyclic GFR-binding peptide
  MOD_RES (19)..(20): Xaa is C or S
PTKGIKYLISIPSLDQSVXXPSASA

SEQ ID NO: 6867 - protein, 16 aa, Artificial Sequence
  Cyclic GFR-binding peptide
  MOD_RES (14)..(15): Xaa is C or S
KYLISIPSLDQSVXXP

SEQ ID NO: 6868 - protein, 24 aa, Artificial Sequence
  Cyclic GFR-binding peptide
  MOD_RES (18)..(19): Xaa is C or S
DYEDFYLMSIANLETPVXXAKPIS

SEQ ID NO: 6869 - protein, 25 aa, Artificial Sequence
  Cyclic GFR-binding peptide
  MOD_RES (19)..(20): Xaa is C or S
VGMDDFYLVSIANLKTPVXXAKGVK

SEQ ID NO: 6870 - protein, 18 aa, Artificial Sequence
  Cyclic GFR-binding peptide
  MOD_RES (14)..(15): Xaa is C or S
FYLISIANLDQSVXXPSA

SEQ ID NO: 6871 - protein, 20 aa, Artificial Sequence
  Cyclic GFR-binding peptide
  MOD_RES (14)..(15): Xaa is C or S
YYLVSTASLKTPAXXPKPVY

SEQ ID NO: 6872 - protein, 16 aa, Artificial Sequence
  Cyclic GFR-binding peptide
  MOD_RES (14)..(15): Xaa is C or S
LYLVSIASLKTPVXXA

SEQ ID NO: 6873 - protein, 26 aa, Artificial Sequence
  Cyclic GFR-binding peptide
  MOD_RES (20)..(20): Xaa is C or S
VNSSDDYYLVSTASLKTPAXTPKTVH

SEQ ID NO: 6874 - protein, 25 aa, Artificial Sequence
  Cyclic GFR-binding peptide
  MOD_RES (19)..(20): Xaa is C or S
PKRGVYYLISTASLAQPVXXPAASA

SEQ ID NO: 6875 - protein, 19 aa, Artificial Sequence
  Cyclic GFR-binding peptide
VVKENEDKYLMSIPSLETP

SEQ ID NO: 6876 - protein, 19 aa, Artificial Sequence
  Cyclic GFR-binding peptide
  MOD_RES (16)..(16): Xaa is C or S
FYLVSIANLQVQTPRXQVN

SEQ ID NO: 6877 - protein, 28 aa, Artificial Sequence
  Cyclic GFR-binding peptide
  MOD_RES (24)..(24): Xaa is C or S
IPKKRVIEFYLVSIANLQVQTPRXQVNR

SEQ ID NO: 6878 - protein, 18 aa, Artificial Sequence
  Cyclic GFR-binding peptide
FIPKKRVIEKYLVSIPSL

SEQ ID NO: 6879 - protein, 17 aa, Artificial Sequence
  Cyclic GFR-binding peptide
TPVGMDDFYLVSIANLK

SEQ ID NO: 6880 - protein, 27 aa, Artificial Sequence
  Cyclic GFR-binding peptide
  MOD_RES (21)..(22): Xaa is C or S
IVNSSDDKYLVSIPSLKTPAXXPKPVY

SEQ ID NO: 6881 - protein, 18 aa, Artificial Sequence
  Cyclic GFR-binding peptide
IVNNSSDKYLVSIPSLKT

SEQ ID NO: 6882 - protein, 18 aa, Artificial Sequence
  Cyclic GFR-binding peptide
IKPTKGIYYLISTASLDQ

SEQ ID NO: 6883 - protein, 19 aa, Artificial Sequence
  Cyclic GFR-binding peptide
  MOD_RES (14)..(15): Xaa is C or S
YYLMSTASLETPVXXAKPI

SEQ ID NO: 6884 - protein, 19 aa, Artificial Sequence
  Cyclic GFR-binding peptide
VVKDYEDYYLMSTASLETP

SEQ ID NO: 6885 - protein, 18 aa, Artificial Sequence
  Cyclic GFR-binding peptide
  MOD_RES (14)..(15): Xaa is C or S
LYLISIASLDQSVXXPSA

SEQ ID NO: 6886 - protein, 27 aa, Artificial Sequence
  Cyclic GFR-binding peptide
  MOD_RES (21)..(22): Xaa is C or S
IKPTKGIFYLISIANLDQSVXXPSASA

SEQ ID NO: 6887 - protein, 15 aa, Artificial Sequence
  Cyclic GFR-binding peptide
VVKENEDYYLMSTAS

SEQ ID NO: 6888 - protein, 17 aa, Artificial Sequence
  Cyclic GFR-binding peptide
  MOD_RES (14)..(15): Xaa is C or S
KYLISIPSLDQSVXXPS

SEQ ID NO: 6889 - protein, 17 aa, Artificial Sequence
  Cyclic GFR-binding peptide
FIPKKRVIEFYLVSIAN

SEQ ID NO: 6890 - protein, 17 aa, Artificial Sequence
  Cyclic GFR-binding peptide
IKPTKGILYLISIASLD

SEQ ID NO: 6891 - protein, 17 aa, Artificial Sequence
  Cyclic GFR-binding peptide
IVNNSSDFYLVSIANLK

SEQ ID NO: 6892 - protein, 14 aa, Artificial Sequence
  Cyclic GFR-binding peptide
  MOD_RES (14)..(14): Xaa is C or S
FYLISIANLAQPVX

SEQ ID NO: 6893 - protein, 27 aa, Artificial Sequence
  Cyclic GFR-binding peptide
  MOD_RES (21)..(22): Xaa is C or S
VKPTRGVFYLISIANLDQPVXXPSASA

SEQ ID NO: 6894 - protein, 21 aa, Artificial Sequence
  Cyclic GFR-binding peptide
  MOD_RES (15)..(16): Xaa is C or S
DYYLMSTASLETPVXXAKPIS

SEQ ID NO: 6895 - protein, 17 aa, Artificial Sequence
  Cyclic GFR-binding peptide
  MOD_RES (14)..(15): Xaa is C or S
LYLVSIASLKTPAXXAK

SEQ ID NO: 6896 - protein, 21 aa, Artificial Sequence
  Cyclic GFR-binding peptide
  MOD_RES (15)..(16): Xaa is C or S
VYYLISTASLAQPVXXPAASA

SEQ ID NO: 6897 - protein, 17 aa, Artificial Sequence
  Cyclic GFR-binding peptide
IKPTKGIFYLISIANLD

SEQ ID NO: 6898 - protein, 25 aa, Artificial Sequence
  Cyclic GFR-binding peptide
  MOD_RES (19)..(20): Xaa is C or S
PTKGILYLISIASLDQSVXXPSASA

SEQ ID NO: 6899 - protein, 23 aa, Artificial Sequence
  Cyclic GFR-binding peptide
  MOD_RES (17)..(18): Xaa is C or S
KGILYLISIASLDQSVXXPSASA

SEQ ID NO: 6900 - protein, 20 aa, Artificial Sequence
  Cyclic GFR-binding peptide
FIPKKRVIEKYLVSIPSLQV

SEQ ID NO: 6901 - protein, 22 aa, Artificial Sequence
  Cyclic GFR-binding peptide
  MOD_RES (18)..(18): Xaa is C or S
IEKYLVSIPSLQVQTPRXQVNR

SEQ ID NO: 6902 - protein, 24 aa, Artificial Sequence
  Cyclic GFR-binding peptide
  MOD_RES (18)..(19): Xaa is C or S
KRGVKYLISIPSLAQPVXXPAASA

SEQ ID NO: 6903 - protein, 26 aa, Artificial Sequence
  Cyclic GFR-binding peptide
  MOD_RES (20)..(21): Xaa is C or S
KPTRGVYYLISTASLDQPVXXPSASA

SEQ ID NO: 6904 - protein, 24 aa, Artificial Sequence
  Cyclic GFR-binding peptide
  MOD_RES (18)..(18): Xaa is C or S
SSDDLYLVSIASLKTPAXTPKTVH

SEQ ID NO: 6905 - protein, 19 aa, Artificial Sequence
  Cyclic GFR-binding peptide
  MOD_RES (14)..(15): Xaa is C or S
KYLMSIPSLETPVXXAKPI

SEQ ID NO: 6906 - protein, 16 aa, Artificial Sequence
  Cyclic GFR-binding peptide
IKPTKGIKYLISIPSL

SEQ ID NO: 6907 - protein, 27 aa, Artificial Sequence
  Cyclic GFR-binding peptide
  MOD_RES (21)..(22): Xaa is C or S
VVKDYEDYYLMSTASLETPVXXAKPIS

SEQ ID NO: 6908 - protein, 24 aa, Artificial Sequence
  Cyclic GFR-binding peptide
  MOD_RES (18)..(19): Xaa is C or S
SSDDLYLVSIASLKTPAXXPKPVY

SEQ ID NO: 6909 - protein, 26 aa, Artificial Sequence
  Cyclic GFR-binding peptide
  MOD_RES (20)..(21): Xaa is C or S
VKDYEDKYLMSIPSLETPVXXAKPIS

SEQ ID NO: 6910 - protein, 17 aa, Artificial Sequence
  Cyclic GFR-binding peptide
  MOD_RES (14)..(15): Xaa is C or S
YYLISTASLDQPVXXPS

SEQ ID NO: 6911 - protein, 27 aa, Artificial Sequence
  Cyclic GFR-binding peptide
  MOD_RES (21)..(22): Xaa is C or S
VKPTRGVLYLISIASLDQPVXXPSASA

SEQ ID NO: 6912 - protein, 16 aa, Artificial Sequence
  Cyclic GFR-binding peptide
  MOD_RES (14)..(15): Xaa is C or S
KYLMSIPSLETPVXXA

SEQ ID NO: 6913 - protein, 19 aa, Artificial Sequence
  Cyclic GFR-binding peptide
  MOD_RES (16)..(16): Xaa is C or S
LYLVSIASLQVQTPRXQVN

SEQ ID NO: 6914 - protein, 19 aa, Artificial Sequence
  Cyclic GFR-binding peptide
TPVGMDDFYLVSIANLKTP

SEQ ID NO: 6915 - protein, 24 aa, Artificial Sequence
  Cyclic GFR-binding peptide
  MOD_RES (18)..(19): Xaa is C or S
GMDDYYLVSTASLKTPVXXAKGVK

SEQ ID NO: 6916 - protein, 17 aa, Artificial Sequence
  Cyclic GFR-binding peptide
VKPKRGVYYLISTASLA

SEQ ID NO: 6917 - protein, 16 aa, Artificial Sequence
  Cyclic GFR-binding peptide
VKPKRGVLYLISIASL

SEQ ID NO: 6918 - protein, 18 aa, Artificial Sequence
  Cyclic GFR-binding peptide
  MOD_RES (14)..(14): Xaa is C or S
YYLVSTASLKTPAXTPKT

SEQ ID NO: 6919 - protein, 13 aa, Artificial Sequence
  Cyclic GFR-binding peptide
KYLMSIPSLETPV

SEQ ID NO: 6920 - protein, 21 aa, Artificial Sequence
  Cyclic GFR-binding peptide
  MOD_RES (15)..(16): Xaa is C or S
DYYLVSTASLQTPAXXPKPVT

SEQ ID NO: 6921 - protein, 16 aa, Artificial Sequence
  Cyclic GFR-binding peptide
VKPTRGVFYLISIANL

SEQ ID NO: 6922 - protein, 21 aa, Artificial Sequence
  Cyclic GFR-binding peptide
  MOD_RES (15)..(16): Xaa is C or S
DFYLVSIANLKTPAXXAKPVA

SEQ ID NO: 6923 - protein, 13 aa, Artificial Sequence
  Cyclic GFR-binding peptide
FYLVSIANLKTPV

SEQ ID NO: 6924 - protein, 17 aa, Artificial Sequence
  Cyclic GFR-binding peptide
VVKDYEDFYLMSIANLE

SEQ ID NO: 6925 - protein, 14 aa, Artificial Sequence
  Cyclic GFR-binding peptide
  MOD_RES (14)..(14): Xaa is C or S
KYLISIPSLDQSVX

SEQ ID NO: 6926 - protein, 19 aa, Artificial Sequence
  Cyclic GFR-binding peptide
  MOD_RES (14)..(15): Xaa is C or S
FYLVSIANLKTPAXXAKPV

SEQ ID NO: 6927 - protein, 24 aa, Artificial Sequence
  Cyclic GFR-binding peptide
  MOD_RES (18)..(19): Xaa is C or S
SSDDKYLVSIPSLKTPAXXPKPVY

SEQ ID NO: 6928 - protein, 15 aa, Artificial Sequence
  Cyclic GFR-binding peptide
IVNNSSDKYLVSIPS

SEQ ID NO: 6929 - protein, 25 aa, Artificial Sequence
  Cyclic GFR-binding peptide
  MOD_RES (19)..(20): Xaa is C or S
PKRGVFYLISIANLAQPVXXPAASA

SEQ ID NO: 6930 - protein, 21 aa, Artificial Sequence
  Cyclic GFR-binding peptide
  MOD_RES (17)..(17): Xaa is C or S
EKYLVSIPSLQVQTPRXQVNR

SEQ ID NO: 6931 - protein, 16 aa, Artificial Sequence
  Cyclic GFR-binding peptide
  MOD_RES (16)..(16): Xaa is C or S
FYLVSIANLQVQTPRX

SEQ ID NO: 6932 - protein, 21 aa, Artificial Sequence
  Cyclic GFR-binding peptide
  MOD_RES (15)..(16): Xaa is C or S
DKYLVSIPSLKTPAXXPKPVY

SEQ ID NO: 6933 - protein, 15 aa, Artificial Sequence
  Cyclic GFR-binding peptide
VVKDYEDKYLMSIPS

SEQ ID NO: 6934 - protein, 27 aa, Artificial Sequence
  Cyclic GFR-binding peptide
  MOD_RES (21)..(22): Xaa is C or S
IVNSSDDLYLVSIASLQTPAXXPKPVT

SEQ ID NO: 6935 - protein, 23 aa, Artificial Sequence
  Cyclic GFR-binding peptide
  MOD_RES (17)..(18): Xaa is C or S
SDDKYLVSIPSLQTPAXXPKPVT

SEQ ID NO: 6936 - protein, 19 aa, Artificial Sequence
  Cyclic GFR-binding peptide
  MOD_RES (14)..(15): Xaa is C or S
FYLISIANLDQPVXXPSAS

SEQ ID NO: 6937 - protein, 19 aa, Artificial Sequence
  Cyclic GFR-binding peptide
  MOD_RES (14)..(15): Xaa is C or S
LYLVSIASLKTPVXXAKGV

SEQ ID NO: 6938 - protein, 19 aa, Artificial Sequence
  Cyclic GFR-binding peptide
  MOD_RES (14)..(15): Xaa is C or S
KYLVSIPSLKTPAXXAKPV

SEQ ID NO: 6939 - protein, 17 aa, Artificial Sequence
  Cyclic GFR-binding peptide
IVNNSSDLYLVSIASLK

SEQ ID NO: 6940 - protein, 16 aa, Artificial Sequence
  Cyclic GFR-binding peptide
  MOD_RES (14)..(15): Xaa is C or S
FYLMSIANLETPVXXA

SEQ ID NO: 6941 - protein, 17 aa, Artificial Sequence
  Cyclic GFR-binding peptide
  MOD_RES (14)..(15): Xaa is C or S
YYLISTASLAQPVXXPA

SEQ ID NO: 6942 - protein, 27 aa, Artificial Sequence
  Cyclic GFR-binding peptide
  MOD_RES (21)..(22): Xaa is C or S
IVNSSDDLYLVSIASLKTPAXXPKPVY

SEQ ID NO: 6943 - protein, 20 aa, Artificial Sequence
  Cyclic GFR-binding peptide
  MOD_RES (14)..(15): Xaa is C or S
LYLVSIASLKTPAXXAKPVA

SEQ ID NO: 6944 - protein, 22 aa, Artificial Sequence
  Cyclic GFR-binding peptide
  MOD_RES (18)..(18): Xaa is C or S
IEFYLVSIANLQVQTPRXQVNR

SEQ ID NO: 6945 - protein, 19 aa, Artificial Sequence
  Cyclic GFR-binding peptide
IVNSSDDLYLVSIASLQTP

SEQ ID NO: 6946 - protein, 19 aa, Artificial Sequence
  Cyclic GFR-binding peptide
TPVGMDDYYLVSTASLKTP

SEQ ID NO: 6947 - protein, 17 aa, Artificial Sequence
  Cyclic GFR-binding peptide
VVKDYEDKYLMSIPSLE

SEQ ID NO: 6948 - protein, 17 aa, Artificial Sequence
  Cyclic GFR-binding peptide
  MOD_RES (14)..(15): Xaa is C or S
LYLISIASLAQPVXXPA

SEQ ID NO: 6949 - protein, 20 aa, Artificial Sequence
  Cyclic GFR-binding peptide
FIPKKRVIEYYLVSTASLQV

SEQ ID NO: 6950 - protein, 16 aa, Artificial Sequence
  Cyclic GFR-binding peptide
  MOD_RES (14)..(14): Xaa is C or S
LYLVSIASLKTPAXTP

SEQ ID NO: 6951 - protein, 15 aa, Artificial Sequence
  Cyclic GFR-binding peptide
IVNNSSDLYLVSIAS

SEQ ID NO: 6952 - protein, 25 aa, Artificial Sequence
  Cyclic GFR-binding peptide
  MOD_RES (19)..(20): Xaa is C or S
PKRGVKYLISIPSLAQPVXXPAASA

SEQ ID NO: 6953 - protein, 23 aa, Artificial Sequence
  Cyclic GFR-binding peptide
  MOD_RES (17)..(18): Xaa is C or S
KGIFYLISIANLDQSVXXPSASA

SEQ ID NO: 6954 - protein, 16 aa, Artificial Sequence
  Cyclic GFR-binding peptide
VKPTRGVLYLISIASL

SEQ ID NO: 6955 - protein, 24 aa, Artificial Sequence
  Cyclic GFR-binding peptide
  MOD_RES (18)..(19): Xaa is C or S
KRGVLYLISIASLAQPVXXPAASA

SEQ ID NO: 6956 - protein, 24 aa, Artificial Sequence
  Cyclic GFR-binding peptide
  MOD_RES (18)..(19): Xaa is C or S
NSSDKYLVSIPSLKTPAXXAKPVA

SEQ ID NO: 6957 - protein, 17 aa, Artificial Sequence
  Cyclic GFR-binding peptide
IKPTKGIKYLISIPSLD

SEQ ID NO: 6958 - protein, 17 aa, Artificial Sequence
  Cyclic GFR-binding peptide
  MOD_RES (14)..(15): Xaa is C or S
YYLVSTASLKTPAXXPK

SEQ ID NO: 6959 - protein, 22 aa, Artificial Sequence
  Cyclic GFR-binding peptide
  MOD_RES (16)..(17): Xaa is C or S
GVFYLISIANLAQPVXXPAASA

SEQ ID NO: 6960 - protein, 25 aa, Artificial Sequence
  Cyclic GFR-binding peptide
  MOD_RES (19)..(20): Xaa is C or S
VGMDDYYLVSTASLKTPVXXAKGVK

SEQ ID NO: 6961 - protein, 15 aa, Artificial Sequence
  Cyclic GFR-binding peptide
IVNSSDDYYLVSTAS

SEQ ID NO: 6962 - protein, 20 aa, Artificial Sequence
  Cyclic GFR-binding peptide
  MOD_RES (14)..(15): Xaa is C or S
LYLVSIASLKTPVXXAKGVK

SEQ ID NO: 6963 - protein, 23 aa, Artificial Sequence
  Cyclic GFR-binding peptide
  MOD_RES (17)..(17): Xaa is C or S
SDDLYLVSIASLKTPAXTPKTVH

SEQ ID NO: 6964 - protein, 16 aa, Artificial Sequence
  Cyclic GFR-binding peptide
  MOD_RES (14)..(15): Xaa is C or S
KYLVSIPSLKTPAXXA

SEQ ID NO: 6965 - protein, 19 aa, Artificial Sequence
  Cyclic GFR-binding peptide
FIPKKRVIELYLVSIASLQ

SEQ ID NO: 6966 - protein, 24 aa, Artificial Sequence
  Cyclic GFR-binding peptide
  MOD_RES (18)..(19): Xaa is C or S
ENEDFYLMSIANLETPVXXAKPIK

SEQ ID NO: 6967 - protein, 19 aa, Artificial Sequence
  Cyclic GFR-binding peptide
VKPKRGVFYLISIANLAQP

SEQ ID NO: 6968 - protein, 25 aa, Artificial Sequence
  Cyclic GFR-binding peptide
  MOD_RES (19)..(20): Xaa is C or S
NNSSDKYLVSIPSLKTPAXXAKPVA

SEQ ID NO: 6969 - protein, 23 aa, Artificial Sequence
  Cyclic GFR-binding peptide
  MOD_RES (17)..(18): Xaa is C or S
RGVKYLISIPSLDQPVXXPSASA

SEQ ID NO: 6970 - protein, 13 aa, Artificial Sequence
  Cyclic GFR-binding peptide
LYLVSIASLKTPV

SEQ ID NO: 6971 - protein, 16 aa, Artificial Sequence
  Cyclic GFR-binding peptide
  MOD_RES (14)..(15): Xaa is C or S
LYLVSIASLKTPAXXP

SEQ ID NO: 6972 - protein, 15 aa, Artificial Sequence
  Cyclic GFR-binding peptide
  MOD_RES (14)..(15): Xaa is C or S
YYLISTASLDQPVXX

SEQ ID NO: 6973 - protein, 15 aa, Artificial Sequence
  Cyclic GFR-binding peptide
VVKDYEDFYLMSIAN

SEQ ID NO: 6974 - protein, 20 aa, Artificial Sequence
  Cyclic GFR-binding peptide
  MOD_RES (14)..(15): Xaa is C or S
YYLVSTASLKTPVXXAKGVK

SEQ ID NO: 6975 - protein, 14 aa, Artificial Sequence
  Cyclic GFR-binding peptide
LYLVSIASLQVQTP

SEQ ID NO: 6976 - protein, 18 aa, Artificial Sequence
  Cyclic GFR-binding peptide
TPVGMDDLYLVSIASLKT

SEQ ID NO: 6977 - protein, 16 aa, Artificial Sequence
  Cyclic GFR-binding peptide
IVNSSDDKYLVSIPSL

SEQ ID NO: 6978 - protein, 16 aa, Artificial Sequence
  Cyclic GFR-binding peptide
VKPKRGVKYLISIPSL

SEQ ID NO: 6979 - protein, 13 aa, Artificial Sequence
  Cyclic GFR-binding peptide
FYLISIANLDQSV

SEQ ID NO: 6980 - protein, 16 aa, Artificial Sequence
  Cyclic GFR-binding peptide
  MOD_RES (14)..(15): Xaa is C or S
KYLISIPSLDQPVXXP

SEQ ID NO: 6981 - protein, 15 aa, Artificial Sequence
  Cyclic GFR-binding peptide
  MOD_RES (14)..(15): Xaa is C or S
KYLISIPSLDQSVXX

SEQ ID NO: 6982 - protein, 27 aa, Artificial Sequence
  Cyclic GFR-binding peptide
  MOD_RES (21)..(22): Xaa is C or S
IVNSSDDKYLVSIPSLQTPAXXPKPVT

SEQ ID NO: 6983 - protein, 26 aa, Artificial Sequence
  Cyclic GFR-binding peptide
  MOD_RES (20)..(21): Xaa is C or S
VKENEDKYLMSIPSLETPVXXAKPIK

SEQ ID NO: 6984 - protein, 22 aa, Artificial Sequence
  Cyclic GFR-binding peptide
  MOD_RES (16)..(17): Xaa is C or S
DDLYLVSIASLKTPVXXAKGVK

SEQ ID NO: 6985 - protein, 17 aa, Artificial Sequence
  Cyclic GFR-binding peptide
  MOD_RES (14)..(14): Xaa is C or S
KYLVSIPSLKTPAXTPK

SEQ ID NO: 6986 - protein, 19 aa, Artificial Sequence
  Cyclic GFR-binding peptide
IVNSSDDLYLVSIASLKTP

SEQ ID NO: 6987 - protein, 14 aa, Artificial Sequence
  Cyclic GFR-binding peptide
  MOD_RES (14)..(14): Xaa is C or S
YYLISTASLDQSVX

SEQ ID NO: 6988 - protein, 13 aa, Artificial Sequence
  Cyclic GFR-binding peptide
YYLMSTASLETPV

SEQ ID NO: 6989 - protein, 16 aa, Artificial Sequence
  Cyclic GFR-binding peptide
VKPTRGVKYLISIPSL

SEQ ID NO: 6990 - protein, 15 aa, Artificial Sequence
  Cyclic GFR-binding peptide
  MOD_RES (14)..(15): Xaa is C or S
KYLISIPSLAQPVXX

SEQ ID NO: 6991 - protein, 19 aa, Artificial Sequence
  Cyclic GFR-binding peptide
VKPKRGVYYLISTASLAQP

SEQ ID NO: 6992 - protein, 24 aa, Artificial Sequence
  Cyclic GFR-binding peptide
  MOD_RES (18)..(19): Xaa is C or S
TRGVFYLISIANLDQPVXXPSASA

SEQ ID NO: 6993 - protein, 19 aa, Artificial Sequence
  Cyclic GFR-binding peptide
FIPKKRVIEFYLVSIANLQ

SEQ ID NO: 6994 - protein, 17 aa, Artificial Sequence
  Cyclic GFR-binding peptide
IVNSSDDYYLVSTASLQ

SEQ ID NO: 6995 - protein, 16 aa, Artificial Sequence
  Cyclic GFR-binding peptide
  MOD_RES (14)..(15): Xaa is C or S
YYLMSTASLETPVXXA

SEQ ID NO: 6996 - protein, 21 aa, Artificial Sequence
  Cyclic GFR-binding peptide
  MOD_RES (15)..(16): Xaa is C or S
DFYLVSIANLKTPVXXAKGVK

SEQ ID NO: 6997 - protein, 19 aa, Artificial Sequence
  Cyclic GFR-binding peptide
  MOD_RES (14)..(15): Xaa is C or S
FYLISIANLDQSVXXPSAS

SEQ ID NO: 6998 - protein, 17 aa, Artificial Sequence
  Cyclic GFR-binding peptide
  MOD_RES (14)..(14): Xaa is C or S
YYLVSTASLKTPAXTPK

SEQ ID NO: 6999 - protein, 21 aa, Artificial Sequence
  Cyclic GFR-binding peptide
  MOD_RES (15)..(16): Xaa is C or S
IYYLISTASLDQSVXXPSASA

SEQ ID NO: 7000 - protein, 17 aa, Artificial Sequence
  Cyclic GFR-binding peptide
IVNSSDDYYLVSTASLK

SEQ ID NO: 7001 - protein, 18 aa, Artificial Sequence
  Cyclic GFR-binding peptide
VKPKRGVFYLISIANLAQ

SEQ ID NO: 7002 - protein, 16 aa, Artificial Sequence
  Cyclic GFR-binding peptide
IKPTKGIFYLISIANL

SEQ ID NO: 7003 - protein, 18 aa, Artificial Sequence
  Cyclic GFR-binding peptide
  MOD_RES (14)..(15): Xaa is C or S
KYLISIPSLAQPVXXPAA

SEQ ID NO: 7004 - protein, 13 aa, Artificial Sequence
  Cyclic GFR-binding peptide
YYLVSTASLKTPV

SEQ ID NO: 7005 - protein, 20 aa, Artificial Sequence
  Cyclic GFR-binding peptide
  MOD_RES (14)..(15): Xaa is C or S
LYLVSIASLKTPAXXPKPVY

SEQ ID NO: 7006 - protein, 18 aa, Artificial Sequence
  Cyclic GFR-binding peptide
VKPKRGVLYLISIASLAQ

SEQ ID NO: 7007 - protein, 25 aa, Artificial Sequence
  Cyclic GFR-binding peptide
  MOD_RES (19)..(20): Xaa is C or S
NNSSDFYLVSIANLKTPAXXAKPVA

SEQ ID NO: 7008 - protein, 25 aa, Artificial Sequence
  Cyclic GFR-binding peptide
  MOD_RES (19)..(19): Xaa is C or S
NSSDDKYLVSIPSLKTPAXTPKTVH

SEQ ID NO: 7009 - protein, 20 aa, Artificial Sequence
  Cyclic GFR-binding peptide
  MOD_RES (14)..(15): Xaa is C or S
FYLVSIANLKTPVXXAKGVK

SEQ ID NO: 7010 - protein, 18 aa, Artificial Sequence
  Cyclic GFR-binding peptide
  MOD_RES (14)..(15): Xaa is C or S
KYLVSIPSLQTPAXXPKP

SEQ ID NO: 7011 - protein, 18 aa, Artificial Sequence
  Cyclic GFR-binding peptide
VVKDYEDYYLMSTASLET

SEQ ID NO: 7012 - protein, 26 aa, Artificial Sequence
  Cyclic GFR-binding peptide
  MOD_RES (20)..(21): Xaa is C or S
KPTKGIKYLISIPSLDQSVXXPSASA

SEQ ID NO: 7013 - protein, 13 aa, Artificial Sequence
  Cyclic GFR-binding peptide
KYLVSIPSLQTPA

SEQ ID NO: 7014 - protein, 27 aa, Artificial Sequence
  Cyclic GFR-binding peptide
  MOD_RES (21)..(22): Xaa is C or S
VKPTRGVKYLISIPSLDQPVXXPSASA

SEQ ID NO: 7015 - protein, 25 aa, Artificial Sequence
  Cyclic GFR-binding peptide
  MOD_RES (19)..(20): Xaa is C or S
PTRGVLYLISIASLDQPVXXPSASA

SEQ ID NO: 7016 - protein, 23 aa, Artificial Sequence
  Cyclic GFR-binding peptide
  MOD_RES (17)..(18): Xaa is C or S
SDDYYLVSTASLKTPAXXPKPVY

SEQ ID NO: 7017 - protein, 24 aa, Artificial Sequence
  Cyclic GFR-binding peptide
  MOD_RES (18)..(19): Xaa is C or S
NSSDFYLVSIANLKTPAXXAKPVA

SEQ ID NO: 7018 - protein, 14 aa, Artificial Sequence
  Cyclic GFR-binding peptide
  MOD_RES (14)..(14): Xaa is C or S
YYLISTASLAQPVX

SEQ ID NO: 7019 - protein, 25 aa, Artificial Sequence
  Cyclic GFR-binding peptide
  MOD_RES (19)..(20): Xaa is C or S
PKRGVLYLISIASLAQPVXXPAASA

SEQ ID NO: 7020 - protein, 26 aa, Artificial Sequence
  Cyclic GFR-binding peptide
  MOD_RES (20)..(21): Xaa is C or S
VKENEDYYLMSTASLETPVXXAKPIK

SEQ ID NO: 7021 - protein, 22 aa, Artificial Sequence
  Cyclic GFR-binding peptide
  MOD_RES (16)..(17): Xaa is C or S
EDFYLMSIANLETPVXXAKPIK

SEQ ID NO: 7022 - protein, 20 aa, Artificial Sequence
  Cyclic GFR-binding peptide
  MOD_RES (14)..(15): Xaa is C or S
YYLISTASLAQPVXXPAASA

SEQ ID NO: 7023 - protein, 25 aa, Artificial Sequence
  Cyclic GFR-binding peptide
  MOD_RES (19)..(19): Xaa is C or S
NSSDDYYLVSTASLKTPAXTPKTVH

SEQ ID NO: 7024 - protein, 18 aa, Artificial Sequence
  Cyclic GFR-binding peptide
  MOD_RES (14)..(15): Xaa is C or S
YYLVSTASLKTPAXXPKP

SEQ ID NO: 7025 - protein, 14 aa, Artificial Sequence
  Cyclic GFR-binding peptide
  MOD_RES (14)..(14): Xaa is C or S
KYLISIPSLDQPVX

SEQ ID NO: 7026 - protein, 23 aa, Artificial Sequence
  Cyclic GFR-binding peptide
  MOD_RES (17)..(18): Xaa is C or S
SDDYYLVSTASLQTPAXXPKPVT

SEQ ID NO: 7027 - protein, 27 aa, Artificial Sequence
  Cyclic GFR-binding peptide
  MOD_RES (21)..(22): Xaa is C or S
VKPKRGVYYLISTASLAQPVXXPAASA

SEQ ID NO: 7028 - protein, 15 aa, Artificial Sequence
  Cyclic GFR-binding peptide
  MOD_RES (14)..(15): Xaa is C or S
KYLISIPSLDQPVXX

SEQ ID NO: 7029 - protein, 23 aa, Artificial Sequence
  Cyclic GFR-binding peptide
  MOD_RES (17)..(18): Xaa is C or S
SDDKYLVSIPSLKTPAXXPKPVY

SEQ ID NO: 7030 - protein, 17 aa, Artificial Sequence
  Cyclic GFR-binding peptide
  MOD_RES (16)..(16): Xaa is C or S
FYLVSIANLQVQTPRXQ

SEQ ID NO: 7031 - protein, 13 aa, Artificial Sequence
  Cyclic GFR-binding peptide
FYLMSIANLETPV

SEQ ID NO: 7032 - protein, 20 aa, Artificial Sequence
  Cyclic GFR-binding peptide
  MOD_RES (14)..(15): Xaa is C or S
KYLISIPSLAQPVXXPAASA

SEQ ID NO: 7033 - protein, 23 aa, Artificial Sequence
  Cyclic GFR-binding peptide
  MOD_RES (17)..(18): Xaa is C or S
NEDKYLMSIPSLETPVXXAKPIK

SEQ ID NO: 7034 - protein, 18 aa, Artificial Sequence
  Cyclic GFR-binding peptide
  MOD_RES (14)..(15): Xaa is C or S
YYLVSTASLQTPAXXPKP

SEQ ID NO: 7035 - protein, 17 aa, Artificial Sequence
  Cyclic GFR-binding peptide
  MOD_RES (14)..(15): Xaa is C or S
YYLVSTASLQTPAXXPK

SEQ ID NO: 7036 - protein, 15 aa, Artificial Sequence
  Cyclic GFR-binding peptide
VKPTRGVYYLISTAS

SEQ ID NO: 7037 - protein, 25 aa, Artificial Sequence
  Cyclic GFR-binding peptide
  MOD_RES (21)..(21): Xaa is C or S
KRVIELYLVSIASLQVQTPRXQVNR

SEQ ID NO: 7038 - protein, 22 aa, Artificial Sequence
  Cyclic GFR-binding peptide
  MOD_RES (18)..(18): Xaa is C or S
IEYYLVSTASLQVQTPRXQVNR

SEQ ID NO: 7039 - protein, 17 aa, Artificial Sequence
  Cyclic GFR-binding peptide
VVKENEDYYLMSTASLE

SEQ ID NO: 7040 - protein, 16 aa, Artificial Sequence
  Cyclic GFR-binding peptide
  MOD_RES (14)..(15): Xaa is C or S
YYLVSTASLKTPVXXA

SEQ ID NO: 7041 - protein, 26 aa, Artificial Sequence
  Cyclic GFR-binding peptide
  MOD_RES (20)..(21): Xaa is C or S
KPTRGVKYLISIPSLDQPVXXPSASA

SEQ ID NO: 7042 - protein, 17 aa, Artificial Sequence
  Cyclic GFR-binding peptide
  MOD_RES (14)..(15): Xaa is C or S
KYLVSIPSLKTPAXXPK

SEQ ID NO: 7043 - protein, 21 aa, Artificial Sequence
  Cyclic GFR-binding peptide
  MOD_RES (15)..(16): Xaa is C or S
DLYLVSIASLKTPVXXAKGVK

SEQ ID NO: 7044 - protein, 17 aa, Artificial Sequence
  Cyclic GFR-binding peptide
  MOD_RES (14)..(15): Xaa is C or S
KYLVSIPSLQTPAXXPK

SEQ ID NO: 7045 - protein, 16 aa, Artificial Sequence
  Cyclic GFR-binding peptide
TPVGMDDYYLVSTASL

SEQ ID NO: 7046 - protein, 16 aa, Artificial Sequence
  Cyclic GFR-binding peptide
VKPKRGVFYLISIANL

SEQ ID NO: 7047 - protein, 14 aa, Artificial Sequence
  Cyclic GFR-binding peptide
  MOD_RES (14)..(14): Xaa is C or S
YYLISTASLDQPVX

SEQ ID NO: 7048 - protein, 14 aa, Artificial Sequence
  Cyclic GFR-binding peptide
  MOD_RES (14)..(14): Xaa is C or S
KYLISIPSLAQPVX

SEQ ID NO: 7049 - protein, 18 aa, Artificial Sequence
  Cyclic GFR-binding peptide
  MOD_RES (16)..(16): Xaa is C or S
KYLVSIPSLQVQTPRXQV

SEQ ID NO: 7050 - protein, 29 aa, Artificial Sequence
  Cyclic GFR-binding peptide
  MOD_RES (25)..(25): Xaa is C or S
FIPKKRVIEYYLVSTASLQVQTPRXQVNR

SEQ ID NO: 7051 - protein, 21 aa, Artificial Sequence
  Cyclic GFR-binding peptide
  MOD_RES (17)..(17): Xaa is C or S
EFYLVSIANLQVQTPRXQVNR

SEQ ID NO: 7052 - protein, 18 aa, Artificial Sequence
  Cyclic GFR-binding peptide
VKPKRGVKYLISIPSLAQ

SEQ ID NO: 7053 - protein, 20 aa, Artificial Sequence
  Cyclic GFR-binding peptide
  MOD_RES (16)..(16): Xaa is C or S
KYLVSIPSLQVQTPRXQVNR

SEQ ID NO: 7054 - protein, 18 aa, Artificial Sequence
  Cyclic GFR-binding peptide
  MOD_RES (14)..(14): Xaa is C or S
KYLVSIPSLKTPAXTPKT

SEQ ID NO: 7055 - protein, 23 aa, Artificial Sequence
  Cyclic GFR-binding peptide
  MOD_RES (17)..(18): Xaa is C or S
RGVFYLISIANLAQPVXXPAASA

SEQ ID NO: 7056 - protein, 18 aa, Artificial Sequence
  Cyclic GFR-binding peptide
  MOD_RES (14)..(15): Xaa is C or S
KYLVSIPSLKTPAXXPKP

SEQ ID NO: 7057 - protein, 26 aa, Artificial Sequence
  Cyclic GFR-binding peptide
  MOD_RES (20)..(21): Xaa is C or S
VNNSSDFYLVSIANLKTPAXXAKPVA

SEQ ID NO: 7058 - protein, 21 aa, Artificial Sequence
  Cyclic GFR-binding peptide
  MOD_RES (15)..(15): Xaa is C or S
DLYLVSIASLKTPAXTPKTVH

SEQ ID NO: 7059 - protein, 15 aa, Artificial Sequence
  Cyclic GFR-binding peptide
VVKENEDFYLMSIAN

SEQ ID NO: 7060 - protein, 13 aa, Artificial Sequence
  Cyclic GFR-binding peptide
KYLVSIPSLKTPA

SEQ ID NO: 7061 - protein, 18 aa, Artificial Sequence
  Cyclic GFR-binding peptide
TPVGMDDFYLVSIANLKT

SEQ ID NO: 7062 - protein, 18 aa, Artificial Sequence
  Cyclic GFR-binding peptide
FIPKKRVIELYLVSIASL

SEQ ID NO: 7063 - protein, 26 aa, Artificial Sequence
  Cyclic GFR-binding peptide
  MOD_RES (20)..(21): Xaa is C or S
PVGMDDYYLVSTASLKTPVXXAKGVK

SEQ ID NO: 7064 - protein, 13 aa, Artificial Sequence
  Cyclic GFR-binding peptide
YYLVSTASLQTPA

SEQ ID NO: 7065 - protein, 23 aa, Artificial Sequence
  Cyclic GFR-binding peptide
  MOD_RES (17)..(18): Xaa is C or S
MDDFYLVSIANLKTPVXXAKGVK

SEQ ID NO: 7066 - protein, 27 aa, Artificial Sequence
  Cyclic GFR-binding peptide
  MOD_RES (21)..(21): Xaa is C or S
IVNSSDDYYLVSTASLKTPAXTPKTVH

SEQ ID NO: 7067 - protein, 17 aa, Artificial Sequence
  Cyclic GFR-binding peptide
IVNNSSDKYLVSIPSLK

SEQ ID NO: 7068 - protein, 24 aa, Artificial Sequence
  Cyclic GFR-binding peptide
  MOD_RES (18)..(19): Xaa is C or S
KRGVFYLISIANLAQPVXXPAASA

SEQ ID NO: 7069 - protein, 22 aa, Artificial Sequence
  Cyclic GFR-binding peptide
  MOD_RES (6)..(7): Xaa is C or S
SIPKAXXVPTELSPISMLYKDE

SEQ ID NO: 7070 - protein, 15 aa, Artificial Sequence
  Cyclic GFR-binding peptide
NAISILYFIGKTPKI

SEQ ID NO: 7071 - protein, 13 aa, Artificial Sequence
  Cyclic GFR-binding peptide
APTQLSAISVLYL

SEQ ID NO: 7072 - protein, 26 aa, Artificial Sequence
  Cyclic GFR-binding peptide
  MOD_RES (5)..(5): Xaa is C or S
RNVQXRPTQVQLSPISVLYKEIVRKK

SEQ ID NO: 7073 - protein, 21 aa, Artificial Sequence
  Cyclic GFR-binding peptide
QVQLNAISVLYFEIVRKKPIF

SEQ ID NO: 7074 - protein, 15 aa, Artificial Sequence
  Cyclic GFR-binding peptide
SPISVLYKDDSSNVI

SEQ ID NO: 7075 - protein, 17 aa, Artificial Sequence
  Cyclic GFR-binding peptide
KLSAISVLYLDDSSNVI

SEQ ID NO: 7076 - protein, 19 aa, Artificial Sequence
  Cyclic GFR-binding peptide
  MOD_RES (5)..(6): Xaa is C or S
SASPXXVSQDLSAISILYL

SEQ ID NO: 7077 - protein, 18 aa, Artificial Sequence
  Cyclic GFR-binding peptide
LNAISVLYFEIVRKKPIF

SEQ ID NO: 7078 - protein, 24 aa, Artificial Sequence
  Cyclic GFR-binding peptide
  MOD_RES (6)..(7): Xaa is C or S
TVPKPXXAPTQLSATSVLYYDDSS

SEQ ID NO: 7079 - protein, 21 aa, Artificial Sequence
  Cyclic GFR-binding peptide
  MOD_RES (7)..(7): Xaa is C or S
HVTKPTXAPTKLSPISVLYKD

SEQ ID NO: 7080 - protein, 21 aa, Artificial Sequence
  Cyclic GFR-binding peptide
  MOD_RES (6)..(7): Xaa is C or S
SIPKAXXVPTELNAISMLYFD

SEQ ID NO: 7081 - protein, 17 aa, Artificial Sequence
  Cyclic GFR-binding peptide
DLSPISILYKVGRTPKV

SEQ ID NO: 7082 - protein, 23 aa, Artificial Sequence
  Cyclic GFR-binding peptide
  MOD_RES (6)..(7): Xaa is C or S
SIPKAXXVPTELSPISMLYKDEY

SEQ ID NO: 7083 - protein, 13 aa, Artificial Sequence
  Cyclic GFR-binding peptide
VPQALSAISILYL

SEQ ID NO: 7084 - protein, 22 aa, Artificial Sequence
  Cyclic GFR-binding peptide
  MOD_RES (6)..(7): Xaa is C or S
TVPKPXXAPTQLSATSVLYYDD

SEQ ID NO: 7085 - protein, 16 aa, Artificial Sequence
  Cyclic GFR-binding peptide
  MOD_RES (2)..(3): Xaa is C or S
PXXAPTQLSATSVLYY

SEQ ID NO: 7086 - protein, 15 aa, Artificial Sequence
  Cyclic GFR-binding peptide
SAISILYLIGKTPKI

SEQ ID NO: 7087 - protein, 26 aa, Artificial Sequence
  Cyclic GFR-binding peptide
  MOD_RES (6)..(7): Xaa is C or S
ASASPXXVPQDLNAISILYFVGRTPK

SEQ ID NO: 7088 - protein, 16 aa, Artificial Sequence
  Cyclic GFR-binding peptide
  MOD_RES (2)..(3): Xaa is C or S
PXXVPQALSATSILYY

SEQ ID NO: 7089 - protein, 23 aa, Artificial Sequence
  Cyclic GFR-binding peptide
  MOD_RES (6)..(7): Xaa is C or S
ASAAPXXVPQALSAISILYLVGR

SEQ ID NO: 7090 - protein, 24 aa, Artificial Sequence
  Cyclic GFR-binding peptide
  MOD_RES (6)..(7): Xaa is C or S
ASASPXXVPQDLSAISILYLVGRT

SEQ ID NO: 7091 - protein, 26 aa, Artificial Sequence
  Cyclic GFR-binding peptide
  MOD_RES (6)..(7): Xaa is C or S
ASAAPXXVPQALSAISILYLVGRKPK

SEQ ID NO: 7092 - protein, 22 aa, Artificial Sequence
  Cyclic GFR-binding peptide
  MOD_RES (6)..(7): Xaa is C or S
AVPKAXXAPTKLSPISVLYKDS

SEQ ID NO: 7093 - protein, 18 aa, Artificial Sequence
  Cyclic GFR-binding peptide
  MOD_RES (4)..(5): Xaa is C or S
ASPXXVPQDLSATSILYY

SEQ ID NO: 7094 - protein, 18 aa, Artificial Sequence
  Cyclic GFR-binding peptide
  MOD_RES (4)..(5): Xaa is C or S
AAPXXVPQALSATSILYY

SEQ ID NO: 7095 - protein, 18 aa, Artificial Sequence
  Cyclic GFR-binding peptide
  MOD_RES (4)..(5): Xaa is C or S
PKAXXAPTKLNAISVLYF

SEQ ID NO: 7096 - protein, 26 aa, Artificial Sequence
  Cyclic GFR-binding peptide
  MOD_RES (6)..(7): Xaa is C or S
AVPKAXXAPTKLSPISVLYKDSSNNV

SEQ ID NO: 7097 - protein, 18 aa, Artificial Sequence
  Cyclic GFR-binding peptide
TELSATSMLYYDENEKVV

SEQ ID NO: 7098 - protein, 24 aa, Artificial Sequence
  Cyclic GFR-binding peptide
  MOD_RES (6)..(7): Xaa is C or S
KIPKAXXVPTELSPISMLYKDENE

SEQ ID NO: 7099 - protein, 25 aa, Artificial Sequence
  Cyclic GFR-binding peptide
  MOD_RES (6)..(7): Xaa is C or S
ASASPXXVPQDLNAISILYFVGRTP

SEQ ID NO: 7100 - protein, 17 aa, Artificial Sequence
  Cyclic GFR-binding peptide
  MOD_RES (2)..(2): Xaa is C or S
QXRPTQVQLSPISVLYK

SEQ ID NO: 7101 - protein, 21 aa, Artificial Sequence
  Cyclic GFR-binding peptide
QVQLSAISVLYLEIVRKKPIF

SEQ ID NO: 7102 - protein, 18 aa, Artificial Sequence
  Cyclic GFR-binding peptide
  MOD_RES (3)..(3): Xaa is C or S
VQXRPTQVQLSAISVLYL

SEQ ID NO: 7103 - protein, 17 aa, Artificial Sequence
  Cyclic GFR-binding peptide
QLSAISVLYLDDSSNVI

SEQ ID NO: 7104 - protein, 21 aa, Artificial Sequence
  Cyclic GFR-binding peptide
  MOD_RES (6)..(7): Xaa is C or S
AVPKAXXAPTKLSAISVLYLD

SEQ ID NO: 7105 - protein, 24 aa, Artificial Sequence
  Cyclic GFR-binding peptide
  MOD_RES (6)..(7): Xaa is C or S
ASAAPXXVPQALSATSILYYVGRK

SEQ ID NO: 7106 - protein, 25 aa, Artificial Sequence
  Cyclic GFR-binding peptide
  MOD_RES (6)..(7): Xaa is C or S
ASASPXXVSQDLSATSILYYIGKTP

SEQ ID NO: 7107 - protein, 22 aa, Artificial Sequence
  Cyclic GFR-binding peptide
  MOD_RES (6)..(7): Xaa is C or S
ASASPXXVSQDLSPISILYKIG

SEQ ID NO: 7108 - protein, 25 aa, Artificial Sequence
  Cyclic GFR-binding peptide
  MOD_RES (6)..(7): Xaa is C or S
AVPKAXXAPTKLSAISVLYLDSSNN

SEQ ID NO: 7109 - protein, 17 aa, Artificial Sequence
  Cyclic GFR-binding peptide
  MOD_RES (2)..(2): Xaa is C or S
QXRPTQVQLSAISVLYL

SEQ ID NO: 7110 - protein, 15 aa, Artificial Sequence
  Cyclic GFR-binding peptide
NAISILYFVGRKPKV

SEQ ID NO: 7111 - protein, 23 aa, Artificial Sequence
  Cyclic GFR-binding peptide
  MOD_RES (6)..(7): Xaa is C or S
ASASPXXVPQDLSATSILYYVGR

SEQ ID NO: 7112 - protein, 16 aa, Artificial Sequence
  Cyclic GFR-binding peptide
LSAISVLYLDDSSNVI

SEQ ID NO: 7113 - protein, 23 aa, Artificial Sequence
  Cyclic GFR-binding peptide
  MOD_RES (5)..(5): Xaa is C or S
RNVQXRPTQVQLSAISVLYLEIV

SEQ ID NO: 7114 - protein, 13 aa, Artificial Sequence
  Cyclic GFR-binding peptide
VSQDLSAISILYL

SEQ ID NO: 7115 - protein, 21 aa, Artificial Sequence
  Cyclic GFR-binding peptide
  MOD_RES (6)..(7): Xaa is C or S
KIPKAXXVPTELNAISMLYFD

SEQ ID NO: 7116 - protein, 29 aa, Artificial Sequence
  Cyclic GFR-binding peptide
  MOD_RES (5)..(5): Xaa is C or S
RNVQXRPTQVQLSAISVLYLEIVRKKPIF

SEQ ID NO: 7117 - protein, 16 aa, Artificial Sequence
  Cyclic GFR-binding peptide
LSATSILYYIGKTPKI

SEQ ID NO: 7118 - protein, 20 aa, Artificial Sequence
  Cyclic GFR-binding peptide
  MOD_RES (6)..(7): Xaa is C or S
AVPKAXXAPTKLNAISVLYF

SEQ ID NO: 7119 - protein, 22 aa, Artificial Sequence
  Cyclic GFR-binding peptide
  MOD_RES (6)..(7): Xaa is C or S
TVPKPXXAPTQLSAISVLYLDD

SEQ ID NO: 7120 - protein, 15 aa, Artificial Sequence
  Cyclic GFR-binding peptide
  MOD_RES (1)..(2): Xaa is C or S
XXVPQALSAISILYL

SEQ ID NO: 7121 - protein, 15 aa, Artificial Sequence
  Cyclic GFR-binding peptide
SATSILYYVGRKPKV

SEQ ID NO: 7122 - protein, 24 aa, Artificial Sequence
  Cyclic GFR-binding peptide
  MOD_RES (6)..(7): Xaa is C or S
KVGKAXXVPTKLSAISVLYLDDMG

SEQ ID NO: 7123 - protein, 27 aa, Artificial Sequence
  Cyclic GFR-binding peptide
  MOD_RES (6)..(7): Xaa is C or S
ASAAPXXVPQALSAISILYLVGRKPKV

SEQ ID NO: 7124 - protein, 15 aa, Artificial Sequence
  Cyclic GFR-binding peptide
SATSILYYIGKTPKI

SEQ ID NO: 7125 - protein, 22 aa, Artificial Sequence
  Cyclic GFR-binding peptide
  MOD_RES (5)..(5): Xaa is C or S
RNVQXRPTQVQLSAISVLYLEI

SEQ ID NO: 7126 - protein, 15 aa, Artificial Sequence
  Cyclic GFR-binding peptide
  MOD_RES (2)..(2): Xaa is C or S
TXAPTKLSATSVLYY

SEQ ID NO: 7127 - protein, 22 aa, Artificial Sequence
  Cyclic GFR-binding peptide
  MOD_RES (7)..(7): Xaa is C or S
HVTKPTXAPTKLSPISVLYKDD

SEQ ID NO: 7128 - protein, 25 aa, Artificial Sequence
  Cyclic GFR-binding peptide
  MOD_RES (6)..(7): Xaa is C or S
KVGKAXXVPTKLSAISVLYLDDMGV

SEQ ID NO: 7129 - protein, 29 aa, Artificial Sequence
  Cyclic GFR-binding peptide
  MOD_RES (5)..(5): Xaa is C or S
RNVQXRPTQVQLNAISVLYFEIVRKKPIF

SEQ ID NO: 7130 - protein, 27 aa, Artificial Sequence
  Cyclic GFR-binding peptide
  MOD_RES (6)..(7): Xaa is C or S
SIPKAXXVPTELSPISMLYKDEYDKVV

SEQ ID NO: 7131 - protein, 27 aa, Artificial Sequence
  Cyclic GFR-binding peptide
  MOD_RES (6)..(7): Xaa is C or S
AVPKAXXAPTKLNAISVLYFDSSNNVI

SEQ ID NO: 7132 - protein, 20 aa, Artificial Sequence
  Cyclic GFR-binding peptide
  MOD_RES (6)..(7): Xaa is C or S
SIPKAXXVPTELSATSMLYY

SEQ ID NO: 7133 - protein, 17 aa, Artificial Sequence
  Cyclic GFR-binding peptide
DLNAISILYFVGRTPKV

SEQ ID NO: 7134 - protein, 17 aa, Artificial Sequence
  Cyclic GFR-binding peptide
  MOD_RES (3)..(4): Xaa is C or S
KAXXVPTELNAISMLYF

SEQ ID NO: 7135 - protein, 17 aa, Artificial Sequence
  Cyclic GFR-binding peptide
QLSPISVLYKDDSSNVI

SEQ ID NO: 7136 - protein, 20 aa, Artificial Sequence
  Cyclic GFR-binding peptide
  MOD_RES (6)..(7): Xaa is C or S
TVPKPXXAPTQLSAISVLYL

SEQ ID NO: 7137 - protein, 19 aa, Artificial Sequence
  Cyclic GFR-binding peptide
  MOD_RES (5)..(6): Xaa is C or S
VPKPXXAPTQLSAISVLYL

SEQ ID NO: 7138 - protein, 17 aa, Artificial Sequence
  Cyclic GFR-binding peptide
KLSPISVLYKDDSSNVI

SEQ ID NO: 7139 - protein, 17 aa, Artificial Sequence
  Cyclic GFR-binding peptide
  MOD_RES (3)..(4): Xaa is C or S
KAXXVPTELSPISMLYK

SEQ ID NO: 7140 - protein, 14 aa, Artificial Sequence
  Cyclic GFR-binding peptide
  MOD_RES (1)..(1): Xaa is C or S
XVPQALSAISILYL

SEQ ID NO: 7141 - protein, 20 aa, Artificial Sequence
  Cyclic GFR-binding peptide
  MOD_RES (6)..(7): Xaa is C or S
TVPKPXXAPTQLSPISVLYK

SEQ ID NO: 7142 - protein, 27 aa, Artificial Sequence
  Cyclic GFR-binding peptide
  MOD_RES (6)..(7): Xaa is C or S
AVPKAXXAPTKLSAISVLYLDSSNNVI

SEQ ID NO: 7143 - protein, 21 aa, Artificial Sequence
  Cyclic GFR-binding peptide
  MOD_RES (6)..(7): Xaa is C or S
ASASPXXVPQDLSATSILYYV

SEQ ID NO: 7144 - protein, 25 aa, Artificial Sequence
  Cyclic GFR-binding peptide
  MOD_RES (6)..(7): Xaa is C or S
KIPKAXXVPTELSPISMLYKDENEK

SEQ ID NO: 7145 - protein, 27 aa, Artificial Sequence
  Cyclic GFR-binding peptide
  MOD_RES (6)..(7): Xaa is C or S
TVPKPXXAPTQLSATSVLYYDDSSNVI

SEQ ID NO: 7146 - protein, 16 aa, Artificial Sequence
  Cyclic GFR-binding peptide
  MOD_RES (1)..(1): Xaa is C or S
XRPTQVQLSAISVLYL

SEQ ID NO: 7147 - protein, 19 aa, Artificial Sequence
  Cyclic GFR-binding peptide
  MOD_RES (5)..(6): Xaa is C or S
VPKAXXAPTKLSAISVLYL

SEQ ID NO: 7148 - protein, 16 aa, Artificial Sequence
  Cyclic GFR-binding peptide
LSATSILYYVGRKPKV

SEQ ID NO: 7149 - protein, 20 aa, Artificial Sequence
  Cyclic GFR-binding peptide
  MOD_RES (6)..(7): Xaa is C or S
AVPKAXXAPTKLSPISVLYK

SEQ ID NO: 7150 - protein, 27 aa, Artificial Sequence
  Cyclic GFR-binding peptide
  MOD_RES (6)..(7): Xaa is C or S
SIPKAXXVPTELNAISMLYFDEYDKVV

SEQ ID NO: 7151 - protein, 20 aa, Artificial Sequence
  Cyclic GFR-binding peptide
  MOD_RES (5)..(5): Xaa is C or S
RNVQXRPTQVQLNAISVLYF

SEQ ID NO: 7152 - protein, 19 aa, Artificial Sequence
  Cyclic GFR-binding peptide
PQDLSPISILYKVGRTPKV

SEQ ID NO: 7153 - protein, 23 aa, Artificial Sequence
  Cyclic GFR-binding peptide
  MOD_RES (5)..(5): Xaa is C or S
RNVQXRPTQVQLNAISVLYFEIV

SEQ ID NO: 7154 - protein, 19 aa, Artificial Sequence
  Cyclic GFR-binding peptide
  MOD_RES (5)..(6): Xaa is C or S
SASPXXVPQDLSAISILYL

SEQ ID NO: 7155 - protein, 26 aa, Artificial Sequence
  Cyclic GFR-binding peptide
  MOD_RES (6)..(7): Xaa is C or S
ASAAPXXVPQALSATSILYYVGRKPK

SEQ ID NO: 7156 - protein, 28 aa, Artificial Sequence
  Cyclic GFR-binding peptide
  MOD_RES (5)..(5): Xaa is C or S
RNVQXRPTQVQLSAISVLYLEIVRKKPI

SEQ ID NO: 7157 - protein, 16 aa, Artificial Sequence
  Cyclic GFR-binding peptide
LSAISILYLIGKTPKI

SEQ ID NO: 7158 - protein, 24 aa, Artificial Sequence
  Cyclic GFR-binding peptide
  MOD_RES (6)..(7): Xaa is C or S
KVGKAXXVPTKLNAISVLYFDDMG

SEQ ID NO: 7159 - protein, 26 aa, Artificial Sequence
  Cyclic GFR-binding peptide
  MOD_RES (6)..(7): Xaa is C or S
ASAAPXXVPQALSPISILYKVGRKPK

SEQ ID NO: 7160 - protein, 25 aa, Artificial Sequence
  Cyclic GFR-binding peptide
  MOD_RES (5)..(5): Xaa is C or S
RNVQXRPTQVQLSATSVLYYEIVRK

SEQ ID NO: 7161 - protein, 19 aa, Artificial Sequence
  Cyclic GFR-binding peptide
  MOD_RES (5)..(6): Xaa is C or S
SASPXXVSQDLSPISILYK

SEQ ID NO: 7162 - protein, 17 aa, Artificial Sequence
  Cyclic GFR-binding peptide
  MOD_RES (4)..(4): Xaa is C or S
KPTXAPTKLSAISVLYL

SEQ ID NO: 7163 - protein, 27 aa, Artificial Sequence
  Cyclic GFR-binding peptide
  MOD_RES (6)..(7): Xaa is C or S
KIPKAXXVPTELSPISMLYKDENEKVV

SEQ ID NO: 7164 - protein, 19 aa, Artificial Sequence
  Cyclic GFR-binding peptide
PTKLSPISVLYKDDSSNVI

SEQ ID NO: 7165 - protein, 17 aa, Artificial Sequence
  Cyclic GFR-binding peptide
ALSPISILYKVGRKPKV

SEQ ID NO: 7166 - protein, 20 aa, Artificial Sequence
  Cyclic GFR-binding peptide
  MOD_RES (6)..(7): Xaa is C or S
KIPKAXXVPTELNAISMLYF

SEQ ID NO: 7167 - protein, 24 aa, Artificial Sequence
  Cyclic GFR-binding peptide
  MOD_RES (6)..(7): Xaa is C or S
ASASPXXVSQDLSATSILYYIGKT

SEQ ID NO: 7168 - protein, 18 aa, Artificial Sequence
  Cyclic GFR-binding peptide
  MOD_RES (3)..(3): Xaa is C or S
VQXRPTQVQLNAISVLYF

SEQ ID NO: 7169 - protein, 27 aa, Artificial Sequence
  Cyclic GFR-binding peptide
  MOD_RES (5)..(5): Xaa is C or S
RNVQXRPTQVQLNAISVLYFEIVRKKP

SEQ ID NO: 7170 - protein, 22 aa, Artificial Sequence
  Cyclic GFR-binding peptide
  MOD_RES (6)..(7): Xaa is C or S
ASAAPXXVPQALSPISILYKVG

SEQ ID NO: 7171 - protein, 17 aa, Artificial Sequence
  Cyclic GFR-binding peptide
  MOD_RES (3)..(4): Xaa is C or S
KPXXAPTKLSAISVLYL

SEQ ID NO: 7172 - protein, 21 aa, Artificial Sequence
  Cyclic GFR-binding peptide
  MOD_RES (6)..(7): Xaa is C or S
YVPKPXXAPTKLSAISVLYLD

SEQ ID NO: 7173 - protein, 19 aa, Artificial Sequence
  Cyclic GFR-binding peptide
PTQLSPISVLYKDDSSNVI

SEQ ID NO: 7174 - protein, 18 aa, Artificial Sequence
  Cyclic GFR-binding peptide
  MOD_RES (4)..(5): Xaa is C or S
PKAXXAPTKLSAISVLYL

SEQ ID NO: 7175 - protein, 22 aa, Artificial Sequence
  Cyclic GFR-binding peptide
  MOD_RES (6)..(7): Xaa is C or S
KIPKAXXVPTELSPISMLYKDE

SEQ ID NO: 7176 - protein, 23 aa, Artificial Sequence
  Cyclic GFR-binding peptide
  MOD_RES (6)..(7): Xaa is C or S
ASAAPXXVPQALSATSILYYVGR

SEQ ID NO: 7177 - protein, 27 aa, Artificial Sequence
  Cyclic GFR-binding peptide
  MOD_RES (5)..(5): Xaa is C or S
RNVQXRPTQVQLSAISVLYLEIVRKKP

SEQ ID NO: 7178 - protein, 27 aa, Artificial Sequence
  Cyclic GFR-binding peptide
  MOD_RES (6)..(7): Xaa is C or S
ASAAPXXVPQALSPISILYKVGRKPKV

SEQ ID NO: 7179 - protein, 15 aa, Artificial Sequence
  Cyclic GFR-binding peptide
  MOD_RES (1)..(2): Xaa is C or S
XXVPQALNAISILYF

SEQ ID NO: 7180 - protein, 21 aa, Artificial Sequence
  Cyclic GFR-binding peptide
  MOD_RES (6)..(7): Xaa is C or S
KIPKAXXVPTELSPISMLYKD

SEQ ID NO: 7181 - protein, 13 aa, Artificial Sequence
  Cyclic GFR-binding peptide
VPQDLSAISILYL

SEQ ID NO: 7182 - protein, 13 aa, Artificial Sequence
  Cyclic GFR-binding peptide
VPQALNAISILYF

SEQ ID NO: 7183 - protein, 19 aa, Artificial Sequence
  Cyclic GFR-binding peptide
PQDLSAISILYLVGRTPKV

SEQ ID NO: 7184 - protein, 24 aa, Artificial Sequence
  Cyclic GFR-binding peptide
  MOD_RES (6)..(7): Xaa is C or S
ASASPXXVPQDLSPISILYKVGRT

SEQ ID NO: 7185 - protein, 19 aa, Artificial Sequence
  Cyclic GFR-binding peptide
PQALSPISILYKVGRKPKV

SEQ ID NO: 7186 - protein, 14 aa, Artificial Sequence
  Cyclic GFR-binding peptide
  MOD_RES (1)..(1): Xaa is C or S
XVPTELSATSMLYY

SEQ ID NO: 7187 - protein, 26 aa, Artificial Sequence
  Cyclic GFR-binding peptide
  MOD_RES (5)..(5): Xaa is C or S
RNVQXRPTQVQLSATSVLYYEIVRKK

SEQ ID NO: 7188 - protein, 17 aa, Artificial Sequence
  Cyclic GFR-binding peptide
ALNAISILYFVGRKPKV

SEQ ID NO: 7189 - protein, 25 aa, Artificial Sequence
  Cyclic GFR-binding peptide
  MOD_RES (7)..(7): Xaa is C or S
HVTKPTXAPTKLSAISVLYLDDSSN

SEQ ID NO: 7190 - protein, 16 aa, Artificial Sequence
  Cyclic GFR-binding peptide
  MOD_RES (2)..(3): Xaa is C or S
PXXVPQDLSATSILYY

SEQ ID NO: 7191 - protein, 25 aa, Artificial Sequence
  Cyclic GFR-binding peptide
  MOD_RES (6)..(7): Xaa is C or S
ASASPXXVPQDLSPISILYKVGRTP

SEQ ID NO: 7192 - protein, 16 aa, Artificial Sequence
  Cyclic GFR-binding peptide
LSATSILYYVGRTPKV

SEQ ID NO: 7193 - protein, 21 aa, Artificial Sequence
  Cyclic GFR-binding peptide
  MOD_RES (6)..(7): Xaa is C or S
ASASPXXVPQDLSAISILYLV

SEQ ID NO: 7194 - protein, 18 aa, Artificial Sequence
  Cyclic GFR-binding peptide
TKLSATSVLYYDDMGVPT

SEQ ID NO: 7195 - protein, 18 aa, Artificial Sequence
  Cyclic GFR-binding peptide
  MOD_RES (4)..(5): Xaa is C or S
GKAXXVPTKLSATSVLYY

SEQ ID NO: 7196 - protein, 27 aa, Artificial Sequence
  Cyclic GFR-binding peptide
  MOD_RES (6)..(7): Xaa is C or S
AVPKAXXAPTKLSPISVLYKDSSNNVI

SEQ ID NO: 7197 - protein, 16 aa, Artificial Sequence
  Cyclic GFR-binding peptide
  MOD_RES (2)..(3): Xaa is C or S
PXXVSQDLSATSILYY

SEQ ID NO: 7198 - protein, 25 aa, Artificial Sequence
  Cyclic GFR-binding peptide
  MOD_RES (6)..(7): Xaa is C or S
KIPKAXXVPTELNAISMLYFDENEK

SEQ ID NO: 7199 - protein, 20 aa, Artificial Sequence
  Cyclic GFR-binding peptide
  MOD_RES (6)..(7): Xaa is C or S
ASASPXXVPQDLSPISILYK

SEQ ID NO: 7200 - protein, 24 aa, Artificial Sequence
  Cyclic GFR-binding peptide
  MOD_RES (6)..(7): Xaa is C or S
SIPKAXXVPTELSATSMLYYDEYD

SEQ ID NO: 7201 - protein, 24 aa, Artificial Sequence
  Cyclic GFR-binding peptide
  MOD_RES (7)..(7): Xaa is C or S
HVTKPTXAPTKLSPISVLYKDDSS

SEQ ID NO: 7202 - protein, 19 aa, Artificial Sequence
  Cyclic GFR-binding peptide
  MOD_RES (5)..(6): Xaa is C or S
VGKAXXVPTKLNAISVLYF

SEQ ID NO: 7203 - protein, 26 aa, Artificial Sequence
  Cyclic GFR-binding peptide
  MOD_RES (5)..(5): Xaa is C or S
RNVQXRPTQVQLNAISVLYFEIVRKK

SEQ ID NO: 7204 - protein, 26 aa, Artificial Sequence
  Cyclic GFR-binding peptide
  MOD_RES (6)..(7): Xaa is C or S
KVGKAXXVPTKLSAISVLYLDDMGVP

SEQ ID NO: 7205 - protein, 26 aa, Artificial Sequence
  Cyclic GFR-binding peptide
  MOD_RES (6)..(7): Xaa is C or S
AVPKAXXAPTKLSAISVLYLDSSNNV

SEQ ID NO: 7206 - protein, 21 aa, Artificial Sequence
  Cyclic GFR-binding peptide
  MOD_RES (6)..(7): Xaa is C or S
ASAAPXXVPQALSPISILYKV

SEQ ID NO: 7207 - protein, 18 aa, Artificial Sequence
  Cyclic GFR-binding peptide
  MOD_RES (4)..(5): Xaa is C or S
PKPXXAPTQLSAISVLYL

SEQ ID NO: 7208 - protein, 15 aa, Artificial Sequence
  Cyclic GFR-binding peptide
  MOD_RES (1)..(2): Xaa is C or S
XXAPTQLSAISVLYL

SEQ ID NO: 7209 - protein, 20 aa, Artificial Sequence
  Cyclic GFR-binding peptide
  MOD_RES (6)..(7): Xaa is C or S
ASAAPXXVPQALNAISILYF

SEQ ID NO: 7210 - protein, 13 aa, Artificial Sequence
  Cyclic GFR-binding peptide
TQVQLSAISVLYL

SEQ ID NO: 7211 - protein, 19 aa, Artificial Sequence
  Cyclic GFR-binding peptide
  MOD_RES (6)..(6): Xaa is C or S
VTKPTXAPTKLSAISVLYL

SEQ ID NO: 7212 - protein, 20 aa, Artificial Sequence
  Cyclic GFR-binding peptide
  MOD_RES (6)..(7): Xaa is C or S
ASAAPXXVPQALSAISILYL

SEQ ID NO: 7213 - protein, 13 aa, Artificial Sequence
  Cyclic GFR-binding peptide
TQVQLNAISVLYF

SEQ ID NO: 7214 - protein, 25 aa, Artificial Sequence
  Cyclic GFR-binding peptide
  MOD_RES (6)..(7): Xaa is C or S
YVPKPXXAPTKLSATSVLYYDDSSN

SEQ ID NO: 7215 - protein, 24 aa, Artificial Sequence
  Cyclic GFR-binding peptide
  MOD_RES (6)..(7): Xaa is C or S
AVPKAXXAPTKLSAISVLYLDSSN

SEQ ID NO: 7216 - protein, 15 aa, Artificial Sequence
  Cyclic GFR-binding peptide
NAISILYFVGRTPKV

SEQ ID NO: 7217 - protein, 15 aa, Artificial Sequence
  Cyclic GFR-binding peptide
SAISVLYLDDSSNVI

SEQ ID NO: 7218 - protein, 21 aa, Artificial Sequence
  Cyclic GFR-binding peptide
  MOD_RES (6)..(7): Xaa is C or S
TVPKPXXAPTQLSAISVLYLD

SEQ ID NO: 7219 - protein, 17 aa, Artificial Sequence
  Cyclic GFR-binding peptide
DLSAISILYLVGRTPKV

SEQ ID NO: 7220 - protein, 19 aa, Artificial Sequence
  Cyclic GFR-binding peptide
SQDLSATSILYYIGKTPKI

SEQ ID NO: 7221 - protein, 27 aa, Artificial Sequence
  Cyclic GFR-binding peptide
  MOD_RES (6)..(7): Xaa is C or S
ASAAPXXVPQALNAISILYFVGRKPKV

SEQ ID NO: 7222 - protein, 25 aa, Artificial Sequence
  Cyclic GFR-binding peptide
  MOD_RES (6)..(7): Xaa is C or S
TVPKPXXAPTQLSAISVLYLDDSSN

SEQ ID NO: 7223 - protein, 27 aa, Artificial Sequence
  Cyclic GFR-binding peptide
  MOD_RES (5)..(5): Xaa is C or S
RNVQXRPTQVQLSPISVLYKEIVRKKP

SEQ ID NO: 7224 - protein, 26 aa, Artificial Sequence
  Cyclic GFR-binding peptide
  MOD_RES (6)..(7): Xaa is C or S
ASASPXXVSQDLSATSILYYIGKTPK

SEQ ID NO: 7225 - protein, 18 aa, Artificial Sequence
  Cyclic GFR-binding peptide
  MOD_RES (5)..(5): Xaa is C or S
TKPTXAPTKLSAISVLYL

SEQ ID NO: 7226 - protein, 20 aa, Artificial Sequence
  Cyclic GFR-binding peptide
  MOD_RES (5)..(5): Xaa is C or S
RNVQXRPTQVQLSAISVLYL

SEQ ID NO: 7227 - protein, 23 aa, Artificial Sequence
  Cyclic GFR-binding peptide
  MOD_RES (6)..(7): Xaa is C or S
AVPKAXXAPTKLSPISVLYKDSS

SEQ ID NO: 7228 - protein, 15 aa, Artificial Sequence
  Cyclic GFR-binding peptide
RPTQVQLSAISVLYL

SEQ ID NO: 7229 - protein, 21 aa, Artificial Sequence
  Cyclic GFR-binding peptide
  MOD_RES (6)..(7): Xaa is C or S
ASAAPXXVPQALNAISILYFV

SEQ ID NO: 7230 - protein, 26 aa, Artificial Sequence
  Cyclic GFR-binding peptide
  MOD_RES (6)..(7): Xaa is C or S
ASASPXXVSQDLNAISILYFIGKTPK

SEQ ID NO: 7231 - protein, 17 aa, Artificial Sequence
  Cyclic GFR-binding peptide
  MOD_RES (3)..(4): Xaa is C or S
KPXXAPTQLSAISVLYL

SEQ ID NO: 7232 - protein, 23 aa, Artificial Sequence
  Cyclic GFR-binding peptide
  MOD_RES (7)..(7): Xaa is C or S
HVTKPTXAPTKLSPISVLYKDDS

SEQ ID NO: 7233 - protein, 17 aa, Artificial Sequence
  Cyclic GFR-binding peptide
  MOD_RES (3)..(4): Xaa is C or S
KAXXVPTKLSATSVLYY

SEQ ID NO: 7234 - protein, 26 aa, Artificial Sequence
  Cyclic GFR-binding peptide
  MOD_RES (6)..(7): Xaa is C or S
YVPKPXXAPTKLSAISVLYLDDSSNV

SEQ ID NO: 7235 - protein, 22 aa, Artificial Sequence
  Cyclic GFR-binding peptide
  MOD_RES (6)..(7): Xaa is C or S
YVPKPXXAPTKLSPISVLYKDD

SEQ ID NO: 7236 - protein, 19 aa, Artificial Sequence
  Cyclic GFR-binding peptide
PTELNAISMLYFDENEKVV

SEQ ID NO: 7237 - protein, 27 aa, Artificial Sequence
  Cyclic GFR-binding peptide
  MOD_RES (6)..(7): Xaa is C or S
KIPKAXXVPTELNAISMLYFDENEKVV

SEQ ID NO: 7238 - protein, 15 aa, Artificial Sequence
  Cyclic GFR-binding peptide
  MOD_RES (1)..(2): Xaa is C or S
XXAPTKLSPISVLYK

SEQ ID NO: 7239 - protein, 23 aa, Artificial Sequence
  Cyclic GFR-binding peptide
  MOD_RES (6)..(7): Xaa is C or S
ASASPXXVSQDLSPISILYKIGK

SEQ ID NO: 7240 - protein, 19 aa, Artificial Sequence
  Cyclic GFR-binding peptide
QLSATSVLYYEIVRKKPIF

SEQ ID NO: 7241 - protein, 24 aa, Artificial Sequence
  Cyclic GFR-binding peptide
  MOD_RES (6)..(7): Xaa is C or S
TVPKPXXAPTQLSAISVLYLDDSS

SEQ ID NO: 7242 - protein, 25 aa, Artificial Sequence
  Cyclic GFR-binding peptide
  MOD_RES (6)..(7): Xaa is C or S
SIPKAXXVPTELNAISMLYFDEYDK

SEQ ID NO: 7243 - protein, 16 aa, Artificial Sequence
  Cyclic GFR-binding peptide
  MOD_RES (2)..(3): Xaa is C or S
PXXAPTKLSPISVLYK

SEQ ID NO: 7244 - protein, 23 aa, Artificial Sequence
  Cyclic GFR-binding peptide
  MOD_RES (6)..(7): Xaa is C or S
ASASPXXVPQDLNAISILYFVGR

SEQ ID NO: 7245 - protein, 19 aa, Artificial Sequence
  Cyclic GFR-binding peptide
  MOD_RES (5)..(6): Xaa is C or S
SAAPXXVPQALSPISILYK

SEQ ID NO: 7246 - protein, 26 aa, Artificial Sequence
  Cyclic GFR-binding peptide
  MOD_RES (7)..(7): Xaa is C or S
HVTKPTXAPTKLSAISVLYLDDSSNV

SEQ ID NO: 7247 - protein, 23 aa, Artificial Sequence
  Cyclic GFR-binding peptide
  MOD_RES (6)..(7): Xaa is C or S
KIPKAXXVPTELNAISMLYFDEN

SEQ ID NO: 7248 - protein, 19 aa, Artificial Sequence
  Cyclic GFR-binding peptide
  MOD_RES (5)..(6): Xaa is C or S
SAAPXXVPQALNAISILYF

SEQ ID NO: 7249 - protein, 13 aa, Artificial Sequence
  Cyclic GFR-binding peptide
VPQDLSPISILYK

SEQ ID NO: 7250 - protein, 19 aa, Artificial Sequence
  Cyclic GFR-binding peptide
  MOD_RES (4)..(4): Xaa is C or S
NVQXRPTQVQLSATSVLYY

SEQ ID NO: 7251 - protein, 25 aa, Artificial Sequence
  Cyclic GFR-binding peptide
  MOD_RES (6)..(7): Xaa is C or S
SIPKAXXVPTELSATSMLYYDEYDK

SEQ ID NO: 7252 - protein, 14 aa, Artificial Sequence
  Cyclic GFR-binding peptide
  MOD_RES (1)..(1): Xaa is C or S
XAPTQLSPISVLYK

SEQ ID NO: 7253 - protein, 15 aa, Artificial Sequence
  Cyclic GFR-binding peptide
SPISILYKVGRTPKV

SEQ ID NO: 7254 - protein, 19 aa, Artificial Sequence
  Cyclic GFR-binding peptide
PQALSAISILYLVGRKPKV

SEQ ID NO: 7255 - protein, 24 aa, Artificial Sequence
  Cyclic GFR-binding peptide
  MOD_RES (6)..(7): Xaa is C or S
KIPKAXXVPTELSATSMLYYDENE

SEQ ID NO: 7256 - protein, 23 aa, Artificial Sequence
  Cyclic GFR-binding peptide
  MOD_RES (6)..(7): Xaa is C or S
TVPKPXXAPTQLSAISVLYLDDS

SEQ ID NO: 7257 - protein, 22 aa, Artificial Sequence
  Cyclic GFR-binding peptide
  MOD_RES (6)..(7): Xaa is C or S
TVPKPXXAPTQLSPISVLYKDD

SEQ ID NO: 7258 - protein, 16 aa, Artificial Sequence
  Cyclic GFR-binding peptide
LNAISMLYFDEYDKVV

SEQ ID NO: 7259 - protein, 18 aa, Artificial Sequence
  Cyclic GFR-binding peptide
TELSPISMLYKDENEKVV

SEQ ID NO: 7260 - protein, 15 aa, Artificial Sequence
  Cyclic GFR-binding peptide
RPTQVQLSATSVLYY

SEQ ID NO: 7261 - protein, 14 aa, Artificial Sequence
  Cyclic GFR-binding peptide
PTQVQLSATSVLYY

SEQ ID NO: 7262 - protein, 19 aa, Artificial Sequence
  Cyclic GFR-binding peptide
PQDLSATSILYYVGRTPKV

SEQ ID NO: 7263 - protein, 17 aa, Artificial Sequence
  Cyclic GFR-binding peptide
  MOD_RES (3)..(4): Xaa is C or S
KAXXVPTELSATSMLYY

SEQ ID NO: 7264 - protein, 17 aa, Artificial Sequence
  Cyclic GFR-binding peptide
SAISVLYLEIVRKKPIF

SEQ ID NO: 7265 - protein, 16 aa, Artificial Sequence
  Cyclic GFR-binding peptide
  MOD_RES (1)..(1): Xaa is C or S
XRPTQVQLSPISVLYK

SEQ ID NO: 7266 - protein, 27 aa, Artificial Sequence
  Cyclic GFR-binding peptide
  MOD_RES (7)..(7): Xaa is C or S
HVTKPTXAPTKLSPISVLYKDDSSNVI

SEQ ID NO: 7267 - protein, 28 aa, Artificial Sequence
  Cyclic GFR-binding peptide
  MOD_RES (5)..(5): Xaa is C or S
RNVQXRPTQVQLSATSVLYYEIVRKKPI

SEQ ID NO: 7268 - protein, 25 aa, Artificial Sequence
  Cyclic GFR-binding peptide
  MOD_RES (6)..(7): Xaa is C or S
YVPKPXXAPTKLSPISVLYKDDSSN

SEQ ID NO: 7269 - protein, 21 aa, Artificial Sequence
  Cyclic GFR-binding peptide
  MOD_RES (5)..(5): Xaa is C or S
RNVQXRPTQVQLSATSVLYYE

SEQ ID NO: 7270 - protein, 18 aa, Artificial Sequence
  Cyclic GFR-binding peptide
QDLSPISILYKVGRTPKV

SEQ ID NO: 7271 - protein, 23 aa, Artificial Sequence
  Cyclic GFR-binding peptide
  MOD_RES (6)..(7): Xaa is C or S
YVPKPXXAPTKLSAISVLYLDDS

SEQ ID NO: 7272 - protein, 18 aa, Artificial Sequence
  Cyclic GFR-binding peptide
TKLSAISVLYLDDSSNVI

SEQ ID NO: 7273 - protein, 14 aa, Artificial Sequence
  Cyclic GFR-binding peptide
  MOD_RES (1)..(1): Xaa is C or S
XAPTKLSAISVLYL

SEQ ID NO: 7274 - protein, 19 aa, Artificial Sequence
  Cyclic GFR-binding peptide
  MOD_RES (5)..(6): Xaa is C or S
VPKPXXAPTKLSAISVLYL

SEQ ID NO: 7275 - protein, 19 aa, Artificial Sequence
  Cyclic GFR-binding peptide
  MOD_RES (5)..(6): Xaa is C or S
IPKAXXVPTELNAISMLYF

SEQ ID NO: 7276 - protein, 17 aa, Artificial Sequence
  Cyclic GFR-binding peptide
  MOD_RES (3)..(4): Xaa is C or S
SPXXVPQDLSAISILYL

SEQ ID NO: 7277 - protein, 27 aa, Artificial Sequence
  Cyclic GFR-binding peptide
  MOD_RES (5)..(5): Xaa is C or S
RNVQXRPTQVQLSATSVLYYEIVRKKP

SEQ ID NO: 7278 - protein, 14 aa, Artificial Sequence
  Cyclic GFR-binding peptide
  MOD_RES (1)..(1): Xaa is C or S
XVPTKLSATSVLYY

SEQ ID NO: 7279 - protein, 20 aa, Artificial Sequence
  Cyclic GFR-binding peptide
  MOD_RES (6)..(7): Xaa is C or S
SIPKAXXVPTELSPISMLYK

SEQ ID NO: 7280 - protein, 26 aa, Artificial Sequence
  Cyclic GFR-binding peptide
  MOD_RES (6)..(7): Xaa is C or S
SIPKAXXVPTELSATSMLYYDEYDKV

SEQ ID NO: 7281 - protein, 20 aa, Artificial Sequence
  Cyclic GFR-binding peptide
  MOD_RES (6)..(7): Xaa is C or S
SIPKAXXVPTELNAISMLYF

SEQ ID NO: 7282 - protein, 18 aa, Artificial Sequence
  Cyclic GFR-binding peptide
TQLSAISVLYLDDSSNVI

SEQ ID NO: 7283 - protein, 19 aa, Artificial Sequence
  Cyclic GFR-binding peptide
PTKLSAISVLYLDDMGVPT

SEQ ID NO: 7284 - protein, 15 aa, Artificial Sequence
  Cyclic GFR-binding peptide
  MOD_RES (1)..(2): Xaa is C or S
XXVPQDLSAISILYL

SEQ ID NO: 7285 - protein, 19 aa, Artificial Sequence
  Cyclic GFR-binding peptide
  MOD_RES (5)..(6): Xaa is C or S
SASPXXVPQDLSPISILYK

SEQ ID NO: 7286 - protein, 17 aa, Artificial Sequence
  Cyclic GFR-binding peptide
  MOD_RES (3)..(4): Xaa is C or S
KAXXVPTKLSAISVLYL

SEQ ID NO: 7287 - protein, 19 aa, Artificial Sequence
  Cyclic GFR-binding peptide
SQDLSPISILYKIGKTPKI

SEQ ID NO: 7288 - protein, 18 aa, Artificial Sequence
  Cyclic GFR-binding peptide
QDLNAISILYFVGRTPKV

SEQ ID NO: 7289 - protein, 20 aa, Artificial Sequence
  Cyclic GFR-binding peptide
  MOD_RES (6)..(7): Xaa is C or S
YVPKPXXAPTKLSPISVLYK

SEQ ID NO: 7290 - protein, 16 aa, Artificial Sequence
  Cyclic GFR-binding peptide
LNAISVLYFDSSNNVI

SEQ ID NO: 7291 - protein, 26 aa, Artificial Sequence
  Cyclic GFR-binding peptide
  MOD_RES (5)..(5): Xaa is C or S
RNVQXRPTQVQLSAISVLYLEIVRKK

SEQ ID NO: 7292 - protein, 22 aa, Artificial Sequence
  Cyclic GFR-binding peptide
  MOD_RES (6)..(7): Xaa is C or S
ASASPXXVPQDLSAISILYLVG

SEQ ID NO: 7293 - protein, 16 aa, Artificial Sequence
  Cyclic GFR-binding peptide
  MOD_RES (2)..(3): Xaa is C or S
AXXAPTKLNAISVLYF

SEQ ID NO: 7294 - protein, 16 aa, Artificial Sequence
  Cyclic GFR-binding peptide
  MOD_RES (3)..(3): Xaa is C or S
PTXAPTKLSATSVLYY

SEQ ID NO: 7295 - protein, 19 aa, Artificial Sequence
  Cyclic GFR-binding peptide
QLSPISVLYKEIVRKKPIF

SEQ ID NO: 7296 - protein, 19 aa, Artificial Sequence
  Cyclic GFR-binding peptide
PQDLNAISILYFVGRTPKV

SEQ ID NO: 7297 - protein, 15 aa, Artificial Sequence
  Cyclic GFR-binding peptide
  MOD_RES (1)..(2): Xaa is C or S
XXVPTKLSAISVLYL

SEQ ID NO: 7298 - protein, 21 aa, Artificial Sequence
  Cyclic GFR-binding peptide
  MOD_RES (6)..(7): Xaa is C or S
ASAAPXXVPQALSAISILYLV

SEQ ID NO: 7299 - protein, 20 aa, Artificial Sequence
  Cyclic GFR-binding peptide
VQLNAISVLYFEIVRKKPIF

SEQ ID NO: 7300 - protein, 14 aa, Artificial Sequence
  Cyclic GFR-binding peptide
  MOD_RES (1)..(1): Xaa is C or S
XVSQDLSAISILYL

SEQ ID NO: 7301 - protein, 15 aa, Artificial Sequence
  Cyclic GFR-binding peptide
  MOD_RES (1)..(2): Xaa is C or S
XXVPTKLNAISVLYF

SEQ ID NO: 7302 - protein, 19 aa, Artificial Sequence
  Cyclic GFR-binding peptide
  MOD_RES (5)..(6): Xaa is C or S
VGKAXXVPTKLSATSVLYY

SEQ ID NO: 7303 - protein, 22 aa, Artificial Sequence
  Cyclic GFR-binding peptide
  MOD_RES (6)..(7): Xaa is C or S
SIPKAXXVPTELSATSMLYYDE

SEQ ID NO: 7304 - protein, 20 aa, Artificial Sequence
  Cyclic GFR-binding peptide
  MOD_RES (6)..(7): Xaa is C or S
ASASPXXVPQDLSATSILYY

SEQ ID NO: 7305 - protein, 16 aa, Artificial Sequence
  Cyclic GFR-binding peptide
  MOD_RES (2)..(3): Xaa is C or S
PXXVPQDLSAISILYL

SEQ ID NO: 7306 - protein, 15 aa, Artificial Sequence
  Cyclic GFR-binding peptide
  MOD_RES (1)..(2): Xaa is C or S
XXVPTKLSATSVLYY

SEQ ID NO: 7307 - protein, 21 aa, Artificial Sequence
  Cyclic GFR-binding peptide
  MOD_RES (6)..(7): Xaa is C or S
YVPKPXXAPTKLSATSVLYYD

SEQ ID NO: 7308 - protein, 21 aa, Artificial Sequence
  Cyclic GFR-binding peptide
  MOD_RES (6)..(7): Xaa is C or S
TVPKPXXAPTQLSPISVLYKD

SEQ ID NO: 7309 - protein, 19 aa, Artificial Sequence
  Cyclic GFR-binding peptide
  MOD_RES (5)..(6): Xaa is C or S
VPKPXXAPTQLSPISVLYK

SEQ ID NO: 7310 - protein, 20 aa, Artificial Sequence
  Cyclic GFR-binding peptide
  MOD_RES (6)..(7): Xaa is C or S
ASASPXXVSQDLSAISILYL

SEQ ID NO: 7311 - protein, 18 aa, Artificial Sequence
  Cyclic GFR-binding peptide
  MOD_RES (4)..(5): Xaa is C or S
AAPXXVPQALNAISILYF

SEQ ID NO: 7312 - protein, 17 aa, Artificial Sequence
  Cyclic GFR-binding peptide
ALSAISILYLVGRKPKV

SEQ ID NO: 7313 - protein, 16 aa, Artificial Sequence
  Cyclic GFR-binding peptide
  MOD_RES (3)..(3): Xaa is C or S
PTXAPTKLSPISVLYK

SEQ ID NO: 7314 - protein, 18 aa, Artificial Sequence
  Cyclic GFR-binding peptide
TQLSPISVLYKDDSSNVI

SEQ ID NO: 7315 - protein, 15 aa, Artificial Sequence
  Cyclic GFR-binding peptide
  MOD_RES (1)..(2): Xaa is C or S
XXVSQDLNAISILYF

SEQ ID NO: 7316 - protein, 27 aa, Artificial Sequence
  Cyclic GFR-binding peptide
  MOD_RES (6)..(7): Xaa is C or S
KIPKAXXVPTELSATSMLYYDENEKVV

SEQ ID NO: 7317 - protein, 19 aa, Artificial Sequence
  Cyclic GFR-binding peptide
PTELSATSMLYYDENEKVV

SEQ ID NO: 7318 - protein, 15 aa, Artificial Sequence
  Cyclic GFR-binding peptide
SAISILYLVGRTPKV

SEQ ID NO: 7319 - protein, 21 aa, Artificial Sequence
  Cyclic GFR-binding peptide
  MOD_RES (6)..(7): Xaa is C or S
SIPKAXXVPTELSPISMLYKD

SEQ ID NO: 7320 - protein, 19 aa, Artificial Sequence
  Cyclic GFR-binding peptide
  MOD_RES (5)..(6): Xaa is C or S
VPKPXXAPTKLSPISVLYK

SEQ ID NO: 7321 - protein, 24 aa, Artificial Sequence
  Cyclic GFR-binding peptide
  MOD_RES (6)..(7): Xaa is C or S
ASASPXXVSQDLNAISILYFIGKT

SEQ ID NO: 7322 - protein, 25 aa, Artificial Sequence
  Cyclic GFR-binding peptide
  MOD_RES (6)..(7): Xaa is C or S
KIPKAXXVPTELSATSMLYYDENEK

SEQ ID NO: 7323 - protein, 20 aa, Artificial Sequence
  Cyclic GFR-binding peptide
VQLSAISVLYLEIVRKKPIF

SEQ ID NO: 7324 - protein, 13 aa, Artificial Sequence
  Cyclic GFR-binding peptide
VPQDLSATSILYY

SEQ ID NO: 7325 - protein, 27 aa, Artificial Sequence
  Cyclic GFR-binding peptide
  MOD_RES (7)..(7): Xaa is C or S
HVTKPTXAPTKLSAISVLYLDDSSNVI

SEQ ID NO: 7326 - protein, 20 aa, Artificial Sequence
  Cyclic GFR-binding peptide
  MOD_RES (6)..(7): Xaa is C or S
ASASPXXVSQDLNAISILYF

SEQ ID NO: 7327 - protein, 21 aa, Artificial Sequence
  Cyclic GFR-binding peptide
  MOD_RES (6)..(7): Xaa is C or S
ASASPXXVSQDLSAISILYLI

SEQ ID NO: 7328 - protein, 17 aa, Artificial Sequence
  Cyclic GFR-binding peptide
DLSATSILYYVGRTPKV

SEQ ID NO: 7329 - protein, 14 aa, Artificial Sequence
  Cyclic GFR-binding peptide
  MOD_RES (1)..(1): Xaa is C or S
XAPTQLSAISVLYL

SEQ ID NO: 7330 - protein, 18 aa, Artificial Sequence
  Cyclic GFR-binding peptide
  MOD_RES (4)..(5): Xaa is C or S
ASPXXVPQDLNAISILYF

SEQ ID NO: 7331 - protein, 20 aa, Artificial Sequence
  Cyclic GFR-binding peptide
  MOD_RES (6)..(7): Xaa is C or S
ASASPXXVSQDLSPISILYK

SEQ ID NO: 7332 - protein, 15 aa, Artificial Sequence
  Cyclic GFR-binding peptide
  MOD_RES (1)..(2): Xaa is C or S
XXVPTELSATSMLYY

SEQ ID NO: 7333 - protein, 18 aa, Artificial Sequence
  Cyclic GFR-binding peptide
TKLSPISVLYKDDSSNVI

SEQ ID NO: 7334 - protein, 24 aa, Artificial Sequence
  Cyclic GFR-binding peptide
  MOD_RES (6)..(7): Xaa is C or S
ASASPXXVPQDLSATSILYYVGRT

SEQ ID NO: 7335 - protein, 13 aa, Artificial Sequence
  Cyclic GFR-binding peptide
VSQDLSPISILYK

SEQ ID NO: 7336 - protein, 16 aa, Artificial Sequence
  Cyclic GFR-binding peptide
  MOD_RES (2)..(3): Xaa is C or S
PXXVPQDLNAISILYF

SEQ ID NO: 7337 - protein, 14 aa, Artificial Sequence
  Cyclic GFR-binding peptide
  MOD_RES (1)..(1): Xaa is C or S
XAPTQLSATSVLYY

SEQ ID NO: 7338 - protein, 16 aa, Artificial Sequence
  Cyclic GFR-binding peptide
  MOD_RES (1)..(1): Xaa is C or S
XRPTQVQLSATSVLYY

SEQ ID NO: 7339 - protein, 16 aa, Artificial Sequence
  Cyclic GFR-binding peptide
LSPISMLYKDEYDKVV

SEQ ID NO: 7340 - protein, 19 aa, Artificial Sequence
  Cyclic GFR-binding peptide
SQDLSAISILYLIGKTPKI

SEQ ID NO: 7341 - protein, 18 aa, Artificial Sequence
  Cyclic GFR-binding peptide
QDLSPISILYKIGKTPKI

SEQ ID NO: 7342 - protein, 16 aa, Artificial Sequence
  Cyclic GFR-binding peptide
  MOD_RES (2)..(3): Xaa is C or S
PXXAPTQLSPISVLYK

SEQ ID NO: 7343 - protein, 15 aa, Artificial Sequence
  Cyclic GFR-binding peptide
NAISVLYFDDMGVPT

SEQ ID NO: 7344 - protein, 18 aa, Artificial Sequence
  Cyclic GFR-binding peptide
TELNAISMLYFDENEKVV

SEQ ID NO: 7345 - protein, 17 aa, Artificial Sequence
  Cyclic GFR-binding peptide
KLSATSVLYYDDMGVPT

SEQ ID NO: 7346 - protein, 19 aa, Artificial Sequence
  Cyclic GFR-binding peptide
SQDLNAISILYFIGKTPKI

SEQ ID NO: 7347 - protein, 20 aa, Artificial Sequence
  Cyclic GFR-binding peptide
  MOD_RES (7)..(7): Xaa is C or S
HVTKPTXAPTKLSATSVLYY

SEQ ID NO: 7348 - protein, 14 aa, Artificial Sequence
  Cyclic GFR-binding peptide
PTQVQLSPISVLYK

SEQ ID NO: 7349 - protein, 16 aa, Artificial Sequence
  Cyclic GFR-binding peptide
  MOD_RES (2)..(3): Xaa is C or S
PXXVPQALNAISILYF

SEQ ID NO: 7350 - protein, 14 aa, Artificial Sequence
  Cyclic GFR-binding peptide
  MOD_RES (1)..(1): Xaa is C or S
XAPTKLSPISVLYK

SEQ ID NO: 7351 - protein, 22 aa, Artificial Sequence
  Cyclic GFR-binding peptide
  MOD_RES (6)..(7): Xaa is C or S
ASASPXXVSQDLSATSILYYIG

SEQ ID NO: 7352 - protein, 15 aa, Artificial Sequence
  Cyclic GFR-binding peptide
  MOD_RES (1)..(2): Xaa is C or S
XXVSQDLSAISILYL

SEQ ID NO: 7353 - protein, 27 aa, Artificial Sequence
  Cyclic GFR-binding peptide
  MOD_RES (6)..(7): Xaa is C or S
ASASPXXVPQDLSATSILYYVGRTPKV

SEQ ID NO: 7354 - protein, 15 aa, Artificial Sequence
  Cyclic GFR-binding peptide
SPISILYKVGRKPKV

SEQ ID NO: 7355 - protein, 26 aa, Artificial Sequence
  Cyclic GFR-binding peptide
  MOD_RES (6)..(7): Xaa is C or S
ASASPXXVSQDLSAISILYLIGKTPK

SEQ ID NO: 7356 - protein, 22 aa, Artificial Sequence
  Cyclic GFR-binding peptide
  MOD_RES (6)..(7): Xaa is C or S
ASASPXXVPQDLNAISILYFVG

SEQ ID NO: 7357 - protein, 22 aa, Artificial Sequence
  Cyclic GFR-binding peptide
  MOD_RES (7)..(7): Xaa is C or S
HVTKPTXAPTKLSATSVLYYDD

SEQ ID NO: 7358 - protein, 23 aa, Artificial Sequence
  Cyclic GFR-binding peptide
  MOD_RES (6)..(7): Xaa is C or S
ASASPXXVSQDLSATSILYYIGK

SEQ ID NO: 7359 - protein, 18 aa, Artificial Sequence
  Cyclic GFR-binding peptide
LSATSVLYYEIVRKKPIF

SEQ ID NO: 7360 - protein, 18 aa, Artificial Sequence
  Cyclic GFR-binding peptide
  MOD_RES (4)..(5): Xaa is C or S
ASPXXVSQDLSATSILYY

SEQ ID NO: 7361 - protein, 19 aa, Artificial Sequence
  Cyclic GFR-binding peptide
PTKLSPISVLYKDSSNNVI

SEQ ID NO: 7362 - protein, 19 aa, Artificial Sequence
  Cyclic GFR-binding peptide
PTELSPISMLYKDEYDKVV

SEQ ID NO: 7363 - protein, 18 aa, Artificial Sequence
  Cyclic GFR-binding peptide
  MOD_RES (4)..(5): Xaa is C or S
PKAXXVPTELSATSMLYY

SEQ ID NO: 7364 - protein, 17 aa, Artificial Sequence
  Cyclic GFR-binding peptide
  MOD_RES (3)..(4): Xaa is C or S
KAXXAPTKLSPISVLYK

SEQ ID NO: 7365 - protein, 21 aa, Artificial Sequence
  Cyclic GFR-binding peptide
  MOD_RES (6)..(7): Xaa is C or S
KVGKAXXVPTKLSATSVLYYD

SEQ ID NO: 7366 - protein, 13 aa, Artificial Sequence
  Cyclic GFR-binding peptide
VPQALSPISILYK

SEQ ID NO: 7367 - protein, 13 aa, Artificial Sequence
  Cyclic GFR-binding peptide
TQVQLSATSVLYY

SEQ ID NO: 7368 - protein, 15 aa, Artificial Sequence
  Cyclic GFR-binding peptide
  MOD_RES (1)..(2): Xaa is C or S
XXAPTQLSPISVLYK

SEQ ID NO: 7369 - protein, 19 aa, Artificial Sequence
  Cyclic GFR-binding peptide
  MOD_RES (5)..(6): Xaa is C or S
SAAPXXVPQALSAISILYL

SEQ ID NO: 7370 - protein, 15 aa, Artificial Sequence
  Cyclic GFR-binding peptide
  MOD_RES (1)..(2): Xaa is C or S
XXVPTELNAISMLYF

SEQ ID NO: 7371 - protein, 16 aa, Artificial Sequence
  Cyclic GFR-binding peptide
LSATSMLYYDENEKVV

SEQ ID NO: 7372 - protein, 27 aa, Artificial Sequence
  Cyclic GFR-binding peptide
  MOD_RES (6)..(7): Xaa is C or S
YVPKPXXAPTKLSATSVLYYDDSSNVI

SEQ ID NO: 7373 - protein, 20 aa, Artificial Sequence
  Cyclic GFR-binding peptide
  MOD_RES (6)..(7): Xaa is C or S
ASASPXXVPQDLSAISILYL

SEQ ID NO: 7374 - protein, 19 aa, Artificial Sequence
  Cyclic GFR-binding peptide
  MOD_RES (6)..(6): Xaa is C or S
VTKPTXAPTKLSPISVLYK

SEQ ID NO: 7375 - protein, 15 aa, Artificial Sequence
  Cyclic GFR-binding peptide
  MOD_RES (2)..(2): Xaa is C or S
TXAPTKLSAISVLYL

SEQ ID NO: 7376 - protein, 26 aa, Artificial Sequence
  Cyclic GFR-binding peptide
  MOD_RES (6)..(7): Xaa is C or S
KIPKAXXVPTELNAISMLYFDENEKV

SEQ ID NO: 7377 - protein, 18 aa, Artificial Sequence
  Cyclic GFR-binding peptide
  MOD_RES (4)..(5): Xaa is C or S
PKAXXAPTKLSPISVLYK

SEQ ID NO: 7378 - protein, 25 aa, Artificial Sequence
  Cyclic GFR-binding peptide
  MOD_RES (6)..(7): Xaa is C or S
TVPKPXXAPTQLSATSVLYYDDSSN

SEQ ID NO: 7379 - protein, 15 aa, Artificial Sequence
  Cyclic GFR-binding peptide
RPTQVQLSPISVLYK

SEQ ID NO: 7380 - protein, 23 aa, Artificial Sequence
  Cyclic GFR-binding peptide
  MOD_RES (6)..(7): Xaa is C or S
SIPKAXXVPTELNAISMLYFDEY

SEQ ID NO: 7381 - protein, 19 aa, Artificial Sequence
  Cyclic GFR-binding peptide
  MOD_RES (5)..(6): Xaa is C or S
VPKPXXAPTKLSATSVLYY

SEQ ID NO: 7382 - protein, 18 aa, Artificial Sequence
  Cyclic GFR-binding peptide
QDLSAISILYLVGRTPKV

SEQ ID NO: 7383 - protein, 20 aa, Artificial Sequence
  Cyclic GFR-binding peptide
  MOD_RES (6)..(7): Xaa is C or S
KIPKAXXVPTELSPISMLYK

SEQ ID NO: 7384 - protein, 26 aa, Artificial Sequence
  Cyclic GFR-binding peptide
  MOD_RES (6)..(7): Xaa is C or S
KVGKAXXVPTKLNAISVLYFDDMGVP

SEQ ID NO: 7385 - protein, 16 aa, Artificial Sequence
  Cyclic GFR-binding peptide
LSAISVLYLDSSNNVI

SEQ ID NO: 7386 - protein, 23 aa, Artificial Sequence
  Cyclic GFR-binding peptide
  MOD_RES (5)..(5): Xaa is C or S
RNVQXRPTQVQLSPISVLYKEIV

SEQ ID NO: 7387 - protein, 23 aa, Artificial Sequence
  Cyclic GFR-binding peptide
  MOD_RES (6)..(7): Xaa is C or S
ASASPXXVPQDLSAISILYLVGR

SEQ ID NO: 7388 - protein, 20 aa, Artificial Sequence
  Cyclic GFR-binding peptide
  MOD_RES (6)..(7): Xaa is C or S
ASASPXXVSQDLSATSILYY

SEQ ID NO: 7389 - protein, 15 aa, Artificial Sequence
  Cyclic GFR-binding peptide
SAISILYLVGRKPKV

SEQ ID NO: 7390 - protein, 25 aa, Artificial Sequence
  Cyclic GFR-binding peptide
  MOD_RES (6)..(7): Xaa is C or S
TVPKPXXAPTQLSPISVLYKDDSSN

SEQ ID NO: 7391 - protein, 16 aa, Artificial Sequence
  Cyclic GFR-binding peptide
LSATSVLYYDDSSNVI

SEQ ID NO: 7392 - protein, 20 aa, Artificial Sequence
  Cyclic GFR-binding peptide
  MOD_RES (6)..(7): Xaa is C or S
KIPKAXXVPTELSATSMLYY

SEQ ID NO: 7393 - protein, 16 aa, Artificial Sequence
  Cyclic GFR-binding peptide
  MOD_RES (2)..(3): Xaa is C or S
PXXVSQDLNAISILYF

SEQ ID NO: 7394 - protein, 14 aa, Artificial Sequence
  Cyclic GFR-binding peptide
  MOD_RES (1)..(1): Xaa is C or S
XVPTELNAISMLYF

SEQ ID NO: 7395 - protein, 13 aa, Artificial Sequence
  Cyclic GFR-binding peptide
TQVQLSPISVLYK

SEQ ID NO: 7396 - protein, 17 aa, Artificial Sequence
  Cyclic GFR-binding peptide
  MOD_RES (3)..(4): Xaa is C or S
SPXXVSQDLSAISILYL

SEQ ID NO: 7397 - protein, 20 aa, Artificial Sequence
  Cyclic GFR-binding peptide
  MOD_RES (6)..(7): Xaa is C or S
ASASPXXVPQDLNAISILYF

SEQ ID NO: 7398 - protein, 25 aa, Artificial Sequence
  Cyclic GFR-binding peptide
  MOD_RES (6)..(7): Xaa is C or S
SIPKAXXVPTELSPISMLYKDEYDK

SEQ ID NO: 7399 - protein, 14 aa, Artificial Sequence
  Cyclic GFR-binding peptide
  MOD_RES (1)..(1): Xaa is C or S
XVPTKLNAISVLYF

SEQ ID NO: 7400 - protein, 16 aa, Artificial Sequence
  Cyclic GFR-binding peptide
LSPISVLYKDSSNNVI

SEQ ID NO: 7401 - protein, 15 aa, Artificial Sequence
  Cyclic GFR-binding peptide
  MOD_RES (1)..(2): Xaa is C or S
XXAPTQLSATSVLYY

SEQ ID NO: 7402 - protein, 17 aa, Artificial Sequence
  Cyclic GFR-binding peptide
DLSATSILYYIGKTPKI

SEQ ID NO: 7403 - protein, 14 aa, Artificial Sequence
  Cyclic GFR-binding peptide
  MOD_RES (1)..(1): Xaa is C or S
XVPTKLSAISVLYL

SEQ ID NO: 7404 - protein, 19 aa, Artificial Sequence
  Cyclic GFR-binding peptide
PTQLSATSVLYYDDSSNVI

SEQ ID NO: 7405 - protein, 15 aa, Artificial Sequence
  Cyclic GFR-binding peptide
SPISILYKIGKTPKI

SEQ ID NO: 7406 - protein, 19 aa, Artificial Sequence
  Cyclic GFR-binding peptide
PTKLSATSVLYYDDSSNVI

SEQ ID NO: 7407 - protein, 18 aa, Artificial Sequence
  Cyclic GFR-binding peptide
QDLNAISILYFIGKTPKI

SEQ ID NO: 7408 - protein, 20 aa, Artificial Sequence
  Cyclic GFR-binding peptide
  MOD_RES (7)..(7): Xaa is C or S
HVTKPTXAPTKLSPISVLYK

SEQ ID NO: 7409 - protein, 24 aa, Artificial Sequence
  Cyclic GFR-binding peptide
  MOD_RES (6)..(7): Xaa is C or S
ASASPXXVSQDLSAISILYLIGKT

SEQ ID NO: 7410 - protein, 19 aa, Artificial Sequence
  Cyclic GFR-binding peptide
  MOD_RES (6)..(6): Xaa is C or S
VTKPTXAPTKLSATSVLYY

SEQ ID NO: 7411 - protein, 16 aa, Artificial Sequence
  Cyclic GFR-binding peptide
  MOD_RES (2)..(3): Xaa is C or S
PXXVSQDLSAISILYL

SEQ ID NO: 7412 - protein, 19 aa, Artificial Sequence
  Cyclic GFR-binding peptide
PTKLSAISVLYLDSSNNVI

SEQ ID NO: 7413 - protein, 24 aa, Artificial Sequence
  Cyclic GFR-binding peptide
  MOD_RES (6)..(7): Xaa is C or S
YVPKPXXAPTKLSATSVLYYDDSS

SEQ ID NO: 7414 - protein, 19 aa, Artificial Sequence
  Cyclic GFR-binding peptide
  MOD_RES (4)..(4): Xaa is C or S
NVQXRPTQVQLSPISVLYK

SEQ ID NO: 7415 - protein, 22 aa, Artificial Sequence
  Cyclic GFR-binding peptide
  MOD_RES (6)..(7): Xaa is C or S
KVGKAXXVPTKLSATSVLYYDD

SEQ ID NO: 7416 - protein, 23 aa, Artificial Sequence
  Cyclic GFR-binding peptide
  MOD_RES (5)..(5): Xaa is C or S
RNVQXRPTQVQLSATSVLYYEIV

SEQ ID NO: 7417 - protein, 21 aa, Artificial Sequence
  Cyclic GFR-binding peptide
  MOD_RES (6)..(7): Xaa is C or S
ASASPXXVSQDLNAISILYFI

SEQ ID NO: 7418 - protein, 27 aa, Artificial Sequence
  Cyclic GFR-binding peptide
  MOD_RES (6)..(7): Xaa is C or S
ASASPXXVSQDLSATSILYYIGKTPKI

SEQ ID NO: 7419 - protein, 17 aa, Artificial Sequence
  Cyclic GFR-binding peptide
  MOD_RES (3)..(4): Xaa is C or S
SPXXVSQDLNAISILYF

SEQ ID NO: 7420 - protein, 19 aa, Artificial Sequence
  Cyclic GFR-binding peptide
PTELNAISMLYFDEYDKVV

SEQ ID NO: 7421 - protein, 22 aa, Artificial Sequence
  Cyclic GFR-binding peptide
  MOD_RES (6)..(7): Xaa is C or S
SIPKAXXVPTELNAISMLYFDE

SEQ ID NO: 7422 - protein, 18 aa, Artificial Sequence
  Cyclic GFR-binding peptide
  MOD_RES (4)..(5): Xaa is C or S
PKAXXVPTELSPISMLYK

SEQ ID NO: 7423 - protein, 27 aa, Artificial Sequence
  Cyclic GFR-binding peptide
  MOD_RES (6)..(7): Xaa is C or S
KVGKAXXVPTKLNAISVLYFDDMGVPT

SEQ ID NO: 7424 - protein, 29 aa, Artificial Sequence
  Cyclic GFR-binding peptide
  MOD_RES (5)..(5): Xaa is C or S
RNVQXRPTQVQLSPISVLYKEIVRKKPIF

SEQ ID NO: 7425 - protein, 18 aa, Artificial Sequence
  Cyclic GFR-binding peptide
  MOD_RES (4)..(5): Xaa is C or S
ASPXXVSQDLSPISILYK

SEQ ID NO: 7426 - protein, 19 aa, Artificial Sequence
  Cyclic GFR-binding peptide
  MOD_RES (5)..(6): Xaa is C or S
SASPXXVSQDLSATSILYY

SEQ ID NO: 7427 - protein, 27 aa, Artificial Sequence
  Cyclic GFR-binding peptide
  MOD_RES (6)..(7): Xaa is C or S
KVGKAXXVPTKLSAISVLYLDDMGVPT

SEQ ID NO: 7428 - protein, 28 aa, Artificial Sequence
  Cyclic GFR-binding peptide
  MOD_RES (5)..(5): Xaa is C or S
RNVQXRPTQVQLSPISVLYKEIVRKKPI

SEQ ID NO: 7429 - protein, 21 aa, Artificial Sequence
  Cyclic GFR-binding peptide
  MOD_RES (6)..(7): Xaa is C or S
ASASPXXVSQDLSPISILYKI

SEQ ID NO: 7430 - protein, 18 aa, Artificial Sequence
  Cyclic GFR-binding peptide
QALSATSILYYVGRKPKV

SEQ ID NO: 7431 - protein, 22 aa, Artificial Sequence
  Cyclic GFR-binding peptide
  MOD_RES (6)..(7): Xaa is C or S
ASAAPXXVPQALSAISILYLVG

SEQ ID NO: 7432 - protein, 16 aa, Artificial Sequence
  Cyclic GFR-binding peptide
LNAISVLYFDDMGVPT

SEQ ID NO: 7433 - protein, 25 aa, Artificial Sequence
  Cyclic GFR-binding peptide
  MOD_RES (6)..(7): Xaa is C or S
YVPKPXXAPTKLSAISVLYLDDSSN

SEQ ID NO: 7434 - protein, 26 aa, Artificial Sequence
  Cyclic GFR-binding peptide
  MOD_RES (6)..(7): Xaa is C or S
TVPKPXXAPTQLSATSVLYYDDSSNV

SEQ ID NO: 7435 - protein, 24 aa, Artificial Sequence
  Cyclic GFR-binding peptide
  MOD_RES (6)..(7): Xaa is C or S
SIPKAXXVPTELSPISMLYKDEYD

SEQ ID NO: 7436 - protein, 21 aa, Artificial Sequence
  Cyclic GFR-binding peptide
  MOD_RES (6)..(7): Xaa is C or S
ASASPXXVPQDLSPISILYKV

SEQ ID NO: 7437 - protein, 17 aa, Artificial Sequence
  Cyclic GFR-binding peptide
ELSPISMLYKDENEKVV

SEQ ID NO: 7438 - protein, 13 aa, Artificial Sequence
  Cyclic GFR-binding peptide
VSQDLSATSILYY

SEQ ID NO: 7439 - protein, 22 aa, Artificial Sequence
  Cyclic GFR-binding peptide
  MOD_RES (6)..(7): Xaa is C or S
AVPKAXXAPTKLNAISVLYFDS

SEQ ID NO: 7440 - protein, 22 aa, Artificial Sequence
  Cyclic GFR-binding peptide
  MOD_RES (6)..(7): Xaa is C or S
KVGKAXXVPTKLNAISVLYFDD

SEQ ID NO: 7441 - protein, 20 aa, Artificial Sequence
  Cyclic GFR-binding peptide
  MOD_RES (6)..(7): Xaa is C or S
TVPKPXXAPTQLSATSVLYY

SEQ ID NO: 7442 - protein, 23 aa, Artificial Sequence
  Cyclic GFR-binding peptide
  MOD_RES (6)..(7): Xaa is C or S
KIPKAXXVPTELSATSMLYYDEN

SEQ ID NO: 7443 - protein, 22 aa, Artificial Sequence
  Cyclic GFR-binding peptide
  MOD_RES (6)..(7): Xaa is C or S
ASAAPXXVPQALSATSILYYVG

SEQ ID NO: 7444 - protein, 20 aa, Artificial Sequence
  Cyclic GFR-binding peptide
  MOD_RES (5)..(5): Xaa is C or S
RNVQXRPTQVQLSATSVLYY

SEQ ID NO: 7445 - protein, 23 aa, Artificial Sequence
  Cyclic GFR-binding peptide
  MOD_RES (6)..(7): Xaa is C or S
KVGKAXXVPTKLSAISVLYLDDM

SEQ ID NO: 7446 - protein, 18 aa, Artificial Sequence
  Cyclic GFR-binding peptide
TKLNAISVLYFDSSNNVI

SEQ ID NO: 7447 - protein, 16 aa, Artificial Sequence
  Cyclic GFR-binding peptide
LNAISMLYFDENEKVV

SEQ ID NO: 7448 - protein, 16 aa, Artificial Sequence
  Cyclic GFR-binding peptide
  MOD_RES (2)..(3): Xaa is C or S
PXXVPQALSAISILYL

SEQ ID NO: 7449 - protein, 16 aa, Artificial Sequence
  Cyclic GFR-binding peptide
  MOD_RES (2)..(3): Xaa is C or S
PXXAPTQLSAISVLYL

SEQ ID NO: 7450 - protein, 23 aa, Artificial Sequence
  Cyclic GFR-binding peptide
  MOD_RES (6)..(7): Xaa is C or S
ASAAPXXVPQALSPISILYKVGR

SEQ ID NO: 7451 - protein, 22 aa, Artificial Sequence
  Cyclic GFR-binding peptide
  MOD_RES (7)..(7): Xaa is C or S
HVTKPTXAPTKLSAISVLYLDD

SEQ ID NO: 7452 - protein, 18 aa, Artificial Sequence
  Cyclic GFR-binding peptide
TKLSAISVLYLDSSNNVI

SEQ ID NO: 7453 - protein, 15 aa, Artificial Sequence
  Cyclic GFR-binding peptide
SPISMLYKDENEKVV

SEQ ID NO: 7454 - protein, 25 aa, Artificial Sequence
  Cyclic GFR-binding peptide
  MOD_RES (6)..(7): Xaa is C or S
ASASPXXVPQDLSATSILYYVGRTP

SEQ ID NO: 7455 - protein, 15 aa, Artificial Sequence
  Cyclic GFR-binding peptide
SATSMLYYDEYDKVV

SEQ ID NO: 7456 - protein, 19 aa, Artificial Sequence
  Cyclic GFR-binding peptide
  MOD_RES (5)..(6): Xaa is C or S
VPKPXXAPTQLSATSVLYY

SEQ ID NO: 7457 - protein, 22 aa, Artificial Sequence
  Cyclic GFR-binding peptide
  MOD_RES (6)..(7): Xaa is C or S
ASASPXXVSQDLNAISILYFIG

SEQ ID NO: 7458 - protein, 14 aa, Artificial Sequence
  Cyclic GFR-binding peptide
PTQVQLNAISVLYF

SEQ ID NO: 7459 - protein, 26 aa, Artificial Sequence
  Cyclic GFR-binding peptide
  MOD_RES (6)..(7): Xaa is C or S
SIPKAXXVPTELNAISMLYFDEYDKV

SEQ ID NO: 7460 - protein, 26 aa, Artificial Sequence
  Cyclic GFR-binding peptide
  MOD_RES (7)..(7): Xaa is C or S
HVTKPTXAPTKLSPISVLYKDDSSNV

SEQ ID NO: 7461 - protein, 17 aa, Artificial Sequence
  Cyclic GFR-binding peptide
  MOD_RES (3)..(4): Xaa is C or S
SPXXVPQDLNAISILYF

SEQ ID NO: 7462 - protein, 16 aa, Artificial Sequence
  Cyclic GFR-binding peptide
  MOD_RES (2)..(3): Xaa is C or S
AXXAPTKLSAISVLYL

SEQ ID NO: 7463 - protein, 18 aa, Artificial Sequence
  Cyclic GFR-binding peptide
  MOD_RES (4)..(5): Xaa is C or S
ASPXXVPQDLSAISILYL

SEQ ID NO: 7464 - protein, 22 aa, Artificial Sequence
  Cyclic GFR-binding peptide
  MOD_RES (6)..(7): Xaa is C or S
YVPKPXXAPTKLSAISVLYLDD

SEQ ID NO: 7465 - protein, 18 aa, Artificial Sequence
  Cyclic GFR-binding peptide
  MOD_RES (4)..(5): Xaa is C or S
GKAXXVPTKLSAISVLYL

SEQ ID NO: 7466 - protein, 23 aa, Artificial Sequence
  Cyclic GFR-binding peptide
  MOD_RES (6)..(7): Xaa is C or S
AVPKAXXAPTKLNAISVLYFDSS

SEQ ID NO: 7467 - protein, 21 aa, Artificial Sequence
  Cyclic GFR-binding peptide
  MOD_RES (7)..(7): Xaa is C or S
HVTKPTXAPTKLSATSVLYYD

SEQ ID NO: 7468 - protein, 24 aa, Artificial Sequence
  Cyclic GFR-binding peptide
  MOD_RES (6)..(7): Xaa is C or S
ASASPXXVSQDLSPISILYKIGKT

SEQ ID NO: 7469 - protein, 27 aa, Artificial Sequence
  Cyclic GFR-binding peptide
  MOD_RES (6)..(7): Xaa is C or S
KVGKAXXVPTKLSATSVLYYDDMGVPT

SEQ ID NO: 7470 - protein, 18 aa, Artificial Sequence
  Cyclic GFR-binding peptide
  MOD_RES (3)..(3): Xaa is C or S
VQXRPTQVQLSATSVLYY

SEQ ID NO: 7471 - protein, 18 aa, Artificial Sequence
  Cyclic GFR-binding peptide
  MOD_RES (4)..(5): Xaa is C or S
PKAXXVPTELNAISMLYF

SEQ ID NO: 7472 - protein, 13 aa, Artificial Sequence
  Cyclic GFR-binding peptide
VPQALSATSILYY

SEQ ID NO: 7473 - protein, 17 aa, Artificial Sequence
  Cyclic GFR-binding peptide
KLSAISVLYLDDMGVPT

SEQ ID NO: 7474 - protein, 18 aa, Artificial Sequence
  Cyclic GFR-binding peptide
TELSPISMLYKDEYDKVV

SEQ ID NO: 7475 - protein, 18 aa, Artificial Sequence
  Cyclic GFR-binding peptide
QDLSAISILYLIGKTPKI

SEQ ID NO: 7476 - protein, 16 aa, Artificial Sequence
  Cyclic GFR-binding peptide
LSAISVLYLDDMGVPT

SEQ ID NO: 7477 - protein, 17 aa, Artificial Sequence
  Cyclic GFR-binding peptide
  MOD_RES (2)..(2): Xaa is C or S
QXRPTQVQLSATSVLYY

SEQ ID NO: 7478 - protein, 17 aa, Artificial Sequence
  Cyclic GFR-binding peptide
  MOD_RES (3)..(4): Xaa is C or S
APXXVPQALSPISILYK

SEQ ID NO: 7479 - protein, 24 aa, Artificial Sequence
  Cyclic GFR-binding peptide
  MOD_RES (7)..(7): Xaa is C or S
HVTKPTXAPTKLSATSVLYYDDSS

SEQ ID NO: 7480 - protein, 25 aa, Artificial Sequence
  Cyclic GFR-binding peptide
  MOD_RES (6)..(7): Xaa is C or S
ASASPXXVSQDLNAISILYFIGKTP

SEQ ID NO: 7481 - protein, 18 aa, Artificial Sequence
  Cyclic GFR-binding peptide
  MOD_RES (4)..(5): Xaa is C or S
GKAXXVPTKLNAISVLYF

SEQ ID NO: 7482 - protein, 27 aa, Artificial Sequence
  Cyclic GFR-binding peptide
  MOD_RES (6)..(7): Xaa is C or S
ASASPXXVSQDLSAISILYLIGKTPKI

SEQ ID NO: 7483 - protein, 17 aa, Artificial Sequence
  Cyclic GFR-binding peptide
SATSVLYYEIVRKKPIF

SEQ ID NO: 7484 - protein, 15 aa, Artificial Sequence
  Cyclic GFR-binding peptide
  MOD_RES (1)..(2): Xaa is C or S
XXVPQALSATSILYY

SEQ ID NO: 7485 - protein, 21 aa, Artificial Sequence
  Cyclic GFR-binding peptide
  MOD_RES (6)..(7): Xaa is C or S
ASASPXXVPQDLNAISILYFV

SEQ ID NO: 7486 - protein, 17 aa, Artificial Sequence
  Cyclic GFR-binding peptide
  MOD_RES (3)..(4): Xaa is C or S
APXXVPQALNAISILYF

SEQ ID NO: 7487 - protein, 18 aa, Artificial Sequence
  Cyclic GFR-binding peptide
  MOD_RES (4)..(5): Xaa is C or S
AAPXXVPQALSAISILYL

SEQ ID NO: 7488 - protein, 26 aa, Artificial Sequence
  Cyclic GFR-binding peptide
  MOD_RES (6)..(7): Xaa is C or S
TVPKPXXAPTQLSAISVLYLDDSSNV

SEQ ID NO: 7489 - protein, 18 aa, Artificial Sequence
  Cyclic GFR-binding peptide
QDLSATSILYYVGRTPKV

SEQ ID NO: 7490 - protein, 26 aa, Artificial Sequence
  Cyclic GFR-binding peptide
  MOD_RES (6)..(7): Xaa is C or S
YVPKPXXAPTKLSATSVLYYDDSSNV

SEQ ID NO: 7491 - protein, 19 aa, Artificial Sequence
  Cyclic GFR-binding peptide
PTKLNAISVLYFDSSNNVI

SEQ ID NO: 7492 - protein, 20 aa, Artificial Sequence
  Cyclic GFR-binding peptide
  MOD_RES (7)..(7): Xaa is C or S
HVTKPTXAPTKLSAISVLYL

SEQ ID NO: 7493 - protein, 18 aa, Artificial Sequence
  Cyclic GFR-binding peptide
  MOD_RES (4)..(5): Xaa is C or S
ASPXXVPQDLSPISILYK

SEQ ID NO: 7494 - protein, 13 aa, Artificial Sequence
  Cyclic GFR-binding peptide
APTKLSAISVLYL

SEQ ID NO: 7495 - protein, 19 aa, Artificial Sequence
  Cyclic GFR-binding peptide
  MOD_RES (5)..(6): Xaa is C or S
SAAPXXVPQALSATSILYY

SEQ ID NO: 7496 - protein, 21 aa, Artificial Sequence
  Cyclic GFR-binding peptide
QVQLSATSVLYYEIVRKKPIF

SEQ ID NO: 7497 - protein, 25 aa, Artificial Sequence
  Cyclic GFR-binding peptide
  MOD_RES (5)..(5): Xaa is C or S
RNVQXRPTQVQLNAISVLYFEIVRK

SEQ ID NO: 7498 - protein, 17 aa, Artificial Sequence
  Cyclic GFR-binding peptide
  MOD_RES (3)..(4): Xaa is C or S
KAXXAPTKLNAISVLYF

SEQ ID NO: 7499 - protein, 23 aa, Artificial Sequence
  Cyclic GFR-binding peptide
  MOD_RES (6)..(7): Xaa is C or S
KVGKAXXVPTKLSATSVLYYDDM

SEQ ID NO: 7500 - protein, 17 aa, Artificial Sequence
  Cyclic GFR-binding peptide
  MOD_RES (3)..(4): Xaa is C or S
SPXXVPQDLSPISILYK

SEQ ID NO: 7501 - protein, 26 aa, Artificial Sequence
  Cyclic GFR-binding peptide
  MOD_RES (6)..(7): Xaa is C or S
ASASPXXVPQDLSAISILYLVGRTPK

SEQ ID NO: 7502 - protein, 17 aa, Artificial Sequence
  Cyclic GFR-binding peptide
ELSATSMLYYDEYDKVV

SEQ ID NO: 7503 - protein, 19 aa, Artificial Sequence
  Cyclic GFR-binding peptide
  MOD_RES (5)..(6): Xaa is C or S
SASPXXVPQDLSATSILYY

SEQ ID NO: 7504 - protein, 23 aa, Artificial Sequence
  Cyclic GFR-binding peptide
  MOD_RES (6)..(7): Xaa is C or S
SIPKAXXVPTELSATSMLYYDEY

SEQ ID NO: 7505 - protein, 15 aa, Artificial Sequence
  Cyclic GFR-binding peptide
SAISVLYLDDMGVPT

SEQ ID NO: 7506 - protein, 16 aa, Artificial Sequence
  Cyclic GFR-binding peptide
  MOD_RES (2)..(3): Xaa is C or S
PXXVPQALSPISILYK

SEQ ID NO: 7507 - protein, 22 aa, Artificial Sequence
  Cyclic GFR-binding peptide
  MOD_RES (6)..(7): Xaa is C or S
ASASPXXVSQDLSAISILYLIG

SEQ ID NO: 7508 - protein, 16 aa, Artificial Sequence
  Cyclic GFR-binding peptide
  MOD_RES (2)..(3): Xaa is C or S
PXXAPTKLSATSVLYY

SEQ ID NO: 7509 - protein, 26 aa, Artificial Sequence
  Cyclic GFR-binding peptide
  MOD_RES (6)..(7): Xaa is C or S
ASAAPXXVPQALNAISILYFVGRKPK

SEQ ID NO: 7510 - protein, 22 aa, Artificial Sequence
  Cyclic GFR-binding peptide
  MOD_RES (6)..(7): Xaa is C or S
AVPKAXXAPTKLSAISVLYLDS

SEQ ID NO: 7511 - protein, 23 aa, Artificial Sequence
  Cyclic GFR-binding peptide
  MOD_RES (6)..(7): Xaa is C or S
AVPKAXXAPTKLSAISVLYLDSS

SEQ ID NO: 7512 - protein, 17 aa, Artificial Sequence
  Cyclic GFR-binding peptide
  MOD_RES (3)..(4): Xaa is C or S
KAXXVPTKLNAISVLYF

SEQ ID NO: 7513 - protein, 15 aa, Artificial Sequence
  Cyclic GFR-binding peptide
RPTQVQLNAISVLYF

SEQ ID NO: 7514 - protein, 27 aa, Artificial Sequence
  Cyclic GFR-binding peptide
  MOD_RES (6)..(7): Xaa is C or S
ASASPXXVSQDLSPISILYKIGKTPKI

SEQ ID NO: 7515 - protein, 22 aa, Artificial Sequence
  Cyclic GFR-binding peptide
  MOD_RES (6)..(7): Xaa is C or S
ASASPXXVPQDLSPISILYKVG

SEQ ID NO: 7516 - protein, 15 aa, Artificial Sequence
  Cyclic GFR-binding peptide
  MOD_RES (1)..(2): Xaa is C or S
XXVPQDLNAISILYF

SEQ ID NO: 7517 - protein, 14 aa, Artificial Sequence
  Cyclic GFR-binding peptide
  MOD_RES (1)..(1): Xaa is C or S
XVPTELSPISMLYK

SEQ ID NO: 7518 - protein, 17 aa, Artificial Sequence
  Cyclic GFR-binding peptide
  MOD_RES (3)..(4): Xaa is C or S
SPXXVSQDLSATSILYY

SEQ ID NO: 7519 - protein, 18 aa, Artificial Sequence
  Cyclic GFR-binding peptide
TKLSATSVLYYDDSSNVI

SEQ ID NO: 7520 - protein, 22 aa, Artificial Sequence
  Cyclic GFR-binding peptide
  MOD_RES (6)..(7): Xaa is C or S
ASASPXXVPQDLSATSILYYVG

SEQ ID NO: 7521 - protein, 18 aa, Artificial Sequence
  Cyclic GFR-binding peptide
TQLSATSVLYYDDSSNVI

SEQ ID NO: 7522 - protein, 21 aa, Artificial Sequence
  Cyclic GFR-binding peptide
  MOD_RES (5)..(5): Xaa is C or S
RNVQXRPTQVQLSAISVLYLE

SEQ ID NO: 7523 - protein, 17 aa, Artificial Sequence
  Cyclic GFR-binding peptide
ELNAISMLYFDENEKVV

SEQ ID NO: 7524 - protein, 17 aa, Artificial Sequence
  Cyclic GFR-binding peptide
SPISVLYKEIVRKKPIF

SEQ ID NO: 7525 - protein, 21 aa, Artificial Sequence
  Cyclic GFR-binding peptide
QVQLSPISVLYKEIVRKKPIF

SEQ ID NO: 7526 - protein, 21 aa, Artificial Sequence
  Cyclic GFR-binding peptide
  MOD_RES (6)..(7): Xaa is C or S
AVPKAXXAPTKLSPISVLYKD

SEQ ID NO: 7527 - protein, 24 aa, Artificial Sequence
  Cyclic GFR-binding peptide
  MOD_RES (6)..(7): Xaa is C or S
TVPKPXXAPTQLSPISVLYKDDSS

SEQ ID NO: 7528 - protein, 23 aa, Artificial Sequence
  Cyclic GFR-binding peptide
  MOD_RES (7)..(7): Xaa is C or S
HVTKPTXAPTKLSATSVLYYDDS

SEQ ID NO: 7529 - protein, 14 aa, Artificial Sequence
  Cyclic GFR-binding peptide
  MOD_RES (1)..(1): Xaa is C or S
XVPQDLSAISILYL

SEQ ID NO: 7530 - protein, 16 aa, Artificial Sequence
  Cyclic GFR-binding peptide
LSATSMLYYDEYDKVV

SEQ ID NO: 7531 - protein, 15 aa, Artificial Sequence
  Cyclic GFR-binding peptide
  MOD_RES (2)..(2): Xaa is C or S
TXAPTKLSPISVLYK

SEQ ID NO: 7532 - protein, 22 aa, Artificial Sequence
  Cyclic GFR-binding peptide
  MOD_RES (6)..(7): Xaa is C or S
KIPKAXXVPTELSATSMLYYDE

SEQ ID NO: 7533 - protein, 18 aa, Artificial Sequence
  Cyclic GFR-binding peptide
  MOD_RES (4)..(5): Xaa is C or S
PKPXXAPTKLSAISVLYL

SEQ ID NO: 7534 - protein, 18 aa, Artificial Sequence
  Cyclic GFR-binding peptide
TELNAISMLYFDEYDKVV

SEQ ID NO: 7535 - protein, 14 aa, Artificial Sequence
  Cyclic GFR-binding peptide
  MOD_RES (1)..(1): Xaa is C or S
XVSQDLNAISILYF

SEQ ID NO: 7536 - protein, 26 aa, Artificial Sequence
  Cyclic GFR-binding peptide
  MOD_RES (6)..(7): Xaa is C or S
TVPKPXXAPTQLSPISVLYKDDSSNV

SEQ ID NO: 7537 - protein, 21 aa, Artificial Sequence
  Cyclic GFR-binding peptide
  MOD_RES (6)..(7): Xaa is C or S
KIPKAXXVPTELSATSMLYYD

SEQ ID NO: 7538 - protein, 15 aa, Artificial Sequence
  Cyclic GFR-binding peptide
  MOD_RES (1)..(2): Xaa is C or S
XXVPTELSPISMLYK

SEQ ID NO: 7539 - protein, 26 aa, Artificial Sequence
  Cyclic GFR-binding peptide
  MOD_RES (6)..(7): Xaa is C or S
YVPKPXXAPTKLSPISVLYKDDSSNV

SEQ ID NO: 7540 - protein, 14 aa, Artificial Sequence
  Cyclic GFR-binding peptide
  MOD_RES (1)..(1): Xaa is C or S
XVPQDLNAISILYF

SEQ ID NO: 7541 - protein, 13 aa, Artificial Sequence
  Cyclic GFR-binding peptide
VPQDLNAISILYF

SEQ ID NO: 7542 - protein, 25 aa, Artificial Sequence
  Cyclic GFR-binding peptide
  MOD_RES (5)..(5): Xaa is C or S
RNVQXRPTQVQLSPISVLYKEIVRK

SEQ ID NO: 7543 - protein, 15 aa, Artificial Sequence
  Cyclic GFR-binding peptide
  MOD_RES (1)..(2): Xaa is C or S
XXVSQDLSATSILYY

SEQ ID NO: 7544 - protein, 15 aa, Artificial Sequence
  Cyclic GFR-binding peptide
NAISVLYFDSSNNVI

SEQ ID NO: 7545 - protein, 22 aa, Artificial Sequence
  Cyclic GFR-binding peptide
  MOD_RES (6)..(7): Xaa is C or S
YVPKPXXAPTKLSATSVLYYDD

SEQ ID NO: 7546 - protein, 16 aa, Artificial Sequence
  Cyclic GFR-binding peptide
LSPISMLYKDENEKVV

SEQ ID NO: 7547 - protein, 15 aa, Artificial Sequence
  Cyclic GFR-binding peptide
  MOD_RES (1)..(2): Xaa is C or S
XXAPTKLSAISVLYL

SEQ ID NO: 7548 - protein, 15 aa, Artificial Sequence
  Cyclic GFR-binding peptide
SATSVLYYDDMGVPT

SEQ ID NO: 7549 - protein, 16 aa, Artificial Sequence
  Cyclic GFR-binding peptide
  MOD_RES (2)..(3): Xaa is C or S
AXXVPTKLNAISVLYF

SEQ ID NO: 7550 - protein, 25 aa, Artificial Sequence
  Cyclic GFR-binding peptide
  MOD_RES (6)..(7): Xaa is C or S
ASASPXXVSQDLSPISILYKIGKTP

SEQ ID NO: 7551 - protein, 16 aa, Artificial Sequence
  Cyclic GFR-binding peptide
  MOD_RES (2)..(3): Xaa is C or S
PXXVSQDLSPISILYK

SEQ ID NO: 7552 - protein, 24 aa, Artificial Sequence
  Cyclic GFR-binding peptide
  MOD_RES (6)..(7): Xaa is C or S
SIPKAXXVPTELNAISMLYFDEYD

SEQ ID NO: 7553 - protein, 25 aa, Artificial Sequence
  Cyclic GFR-binding peptide
  MOD_RES (6)..(7): Xaa is C or S
KVGKAXXVPTKLNAISVLYFDDMGV

SEQ ID NO: 7554 - protein, 18 aa, Artificial Sequence
  Cyclic GFR-binding peptide
  MOD_RES (4)..(5): Xaa is C or S
ASPXXVSQDLNAISILYF

SEQ ID NO: 7555 - protein, 20 aa, Artificial Sequence
  Cyclic GFR-binding peptide
  MOD_RES (6)..(7): Xaa is C or S
YVPKPXXAPTKLSATSVLYY

SEQ ID NO: 7556 - protein, 16 aa, Artificial Sequence
  Cyclic GFR-binding peptide
  MOD_RES (2)..(3): Xaa is C or S
AXXVPTKLSAISVLYL

SEQ ID NO: 7557 - protein, 26 aa, Artificial Sequence
  Cyclic GFR-binding peptide
  MOD_RES (7)..(7): Xaa is C or S
HVTKPTXAPTKLSATSVLYYDDSSNV

SEQ ID NO: 7558 - protein, 25 aa, Artificial Sequence
  Cyclic GFR-binding peptide
  MOD_RES (6)..(7): Xaa is C or S
ASAAPXXVPQALSATSILYYVGRKP

SEQ ID NO: 7559 - protein, 19 aa, Artificial Sequence
  Cyclic GFR-binding peptide
PTELSPISMLYKDENEKVV

SEQ ID NO: 7560 - protein, 19 aa, Artificial Sequence
  Cyclic GFR-binding peptide
  MOD_RES (4)..(4): Xaa is C or S
NVQXRPTQVQLNAISVLYF

SEQ ID NO: 7561 - protein, 28 aa, Artificial Sequence
  Cyclic GFR-binding peptide
  MOD_RES (5)..(5): Xaa is C or S
RNVQXRPTQVQLNAISVLYFEIVRKKPI

SEQ ID NO: 7562 - protein, 18 aa, Artificial Sequence
  Cyclic GFR-binding peptide
LSPISVLYKEIVRKKPIF

SEQ ID NO: 7563 - protein, 17 aa, Artificial Sequence
  Cyclic GFR-binding peptide
KLNAISVLYFDDMGVPT

SEQ ID NO: 7564 - protein, 27 aa, Artificial Sequence
  Cyclic GFR-binding peptide
  MOD_RES (6)..(7): Xaa is C or S
YVPKPXXAPTKLSPISVLYKDDSSNVI

SEQ ID NO: 7565 - protein, 18 aa, Artificial Sequence
  Cyclic GFR-binding peptide
TKLSPISVLYKDSSNNVI

SEQ ID NO: 7566 - protein, 18 aa, Artificial Sequence
  Cyclic GFR-binding peptide
QDLSATSILYYIGKTPKI

SEQ ID NO: 7567 - protein, 19 aa, Artificial Sequence
  Cyclic GFR-binding peptide
  MOD_RES (5)..(6): Xaa is C or S
IPKAXXVPTELSATSMLYY

SEQ ID NO: 7568 - protein, 19 aa, Artificial Sequence
  Cyclic GFR-binding peptide
PTELSATSMLYYDEYDKVV

SEQ ID NO: 7569 - protein, 18 aa, Artificial Sequence
  Cyclic GFR-binding peptide
  MOD_RES (4)..(5): Xaa is C or S
ASPXXVSQDLSAISILYL

SEQ ID NO: 7570 - protein, 27 aa, Artificial Sequence
  Cyclic GFR-binding peptide
  MOD_RES (6)..(7): Xaa is C or S
ASASPXXVSQDLNAISILYFIGKTPKI

SEQ ID NO: 7571 - protein, 15 aa, Artificial Sequence
  Cyclic GFR-binding peptide
SATSMLYYDENEKVV

SEQ ID NO: 7572 - protein, 17 aa, Artificial Sequence
  Cyclic GFR-binding peptide
  MOD_RES (3)..(4): Xaa is C or S
SPXXVSQDLSPISILYK

SEQ ID NO: 7573 - protein, 17 aa, Artificial Sequence
  Cyclic GFR-binding peptide
NAISVLYFEIVRKKPIF

SEQ ID NO: 7574 - protein, 17 aa, Artificial Sequence
  Cyclic GFR-binding peptide
DLSAISILYLIGKTPKI

SEQ ID NO: 7575 - protein, 17 aa, Artificial Sequence
  Cyclic GFR-binding peptide
KLNAISVLYFDSSNNVI

SEQ ID NO: 7576 - protein, 14 aa, Artificial Sequence
  Cyclic GFR-binding peptide
  MOD_RES (1)..(1): Xaa is C or S
XVPQALNAISILYF

SEQ ID NO: 7577 - protein, 27 aa, Artificial Sequence
  Cyclic GFR-binding peptide
  MOD_RES (6)..(7): Xaa is C or S
ASASPXXVPQDLNAISILYFVGRTPKV

SEQ ID NO: 7578 - protein, 21 aa, Artificial Sequence
  Cyclic GFR-binding peptide
  MOD_RES (6)..(7): Xaa is C or S
SIPKAXXVPTELSATSMLYYD

SEQ ID NO: 7579 - protein, 17 aa, Artificial Sequence
  Cyclic GFR-binding peptide
  MOD_RES (3)..(4): Xaa is C or S
KAXXAPTKLSAISVLYL

SEQ ID NO: 7580 - protein, 21 aa, Artificial Sequence
  Cyclic GFR-binding peptide
  MOD_RES (6)..(7): Xaa is C or S
ASAAPXXVPQALSATSILYYV

SEQ ID NO: 7581 - protein, 17 aa, Artificial Sequence
  Cyclic GFR-binding peptide
DLNAISILYFIGKTPKI

SEQ ID NO: 7582 - protein, 25 aa, Artificial Sequence
  Cyclic GFR-binding peptide
  MOD_RES (6)..(7): Xaa is C or S
ASASPXXVSQDLSAISILYLIGKTP

SEQ ID NO: 7583 - protein, 23 aa, Artificial Sequence
  Cyclic GFR-binding peptide
  MOD_RES (6)..(7): Xaa is C or S
ASASPXXVSQDLSAISILYLIGK

SEQ ID NO: 7584 - protein, 20 aa, Artificial Sequence
  Cyclic GFR-binding peptide
VQLSPISVLYKEIVRKKPIF

SEQ ID NO: 7585 - protein, 22 aa, Artificial Sequence
  Cyclic GFR-binding peptide
  MOD_RES (5)..(5): Xaa is C or S
RNVQXRPTQVQLSPISVLYKEI

SEQ ID NO: 7586 - protein, 24 aa, Artificial Sequence
  Cyclic GFR-binding peptide
  MOD_RES (6)..(7): Xaa is C or S
ASAAPXXVPQALSPISILYKVGRK

SEQ ID NO: 7587 - protein, 26 aa, Artificial Sequence
  Cyclic GFR-binding peptide
  MOD_RES (6)..(7): Xaa is C or S
ASASPXXVPQDLSATSILYYVGRTPK

SEQ ID NO: 7588 - protein, 24 aa, Artificial Sequence
  Cyclic GFR-binding peptide
  MOD_RES (7)..(7): Xaa is C or S
HVTKPTXAPTKLSAISVLYLDDSS

SEQ ID NO: 7589 - protein, 19 aa, Artificial Sequence
  Cyclic GFR-binding peptide
  MOD_RES (5)..(6): Xaa is C or S
IPKAXXVPTELSPISMLYK

SEQ ID NO: 7590 - protein, 16 aa, Artificial Sequence
  Cyclic GFR-binding peptide
LSPISILYKIGKTPKI

SEQ ID NO: 7591 - protein, 27 aa, Artificial Sequence
  Cyclic GFR-binding peptide
  MOD_RES (6)..(7): Xaa is C or S
SIPKAXXVPTELSATSMLYYDEYDKVV

SEQ ID NO: 7592 - protein, 24 aa, Artificial Sequence
  Cyclic GFR-binding peptide
  MOD_RES (6)..(7): Xaa is C or S
YVPKPXXAPTKLSAISVLYLDDSS

SEQ ID NO: 7593 - protein, 26 aa, Artificial Sequence
  Cyclic GFR-binding peptide
  MOD_RES (6)..(7): Xaa is C or S
SIPKAXXVPTELSPISMLYKDEYDKV

SEQ ID NO: 7594 - protein, 17 aa, Artificial Sequence
  Cyclic GFR-binding peptide
  MOD_RES (3)..(4): Xaa is C or S
SPXXVPQDLSATSILYY

SEQ ID NO: 7595 - protein, 27 aa, Artificial Sequence
  Cyclic GFR-binding peptide
  MOD_RES (6)..(7): Xaa is C or S
ASASPXXVPQDLSAISILYLVGRTPKV

SEQ ID NO: 7596 - protein, 16 aa, Artificial Sequence
  Cyclic GFR-binding peptide
  MOD_RES (2)..(3): Xaa is C or S
AXXVPTELSPISMLYK

SEQ ID NO: 7597 - protein, 19 aa, Artificial Sequence
  Cyclic GFR-binding peptide
  MOD_RES (4)..(4): Xaa is C or S
NVQXRPTQVQLSAISVLYL

SEQ ID NO: 7598 - protein, 19 aa, Artificial Sequence
  Cyclic GFR-binding peptide
PTKLNAISVLYFDDMGVPT

SEQ ID NO: 7599 - protein, 24 aa, Artificial Sequence
  Cyclic GFR-binding peptide
  MOD_RES (6)..(7): Xaa is C or S
KVGKAXXVPTKLSATSVLYYDDMG

SEQ ID NO: 7600 - protein, 17 aa, Artificial Sequence
  Cyclic GFR-binding peptide
ALSATSILYYVGRKPKV

SEQ ID NO: 7601 - protein, 16 aa, Artificial Sequence
  Cyclic GFR-binding peptide
LSAISILYLVGRKPKV

SEQ ID NO: 7602 - protein, 18 aa, Artificial Sequence
  Cyclic GFR-binding peptide
  MOD_RES (5)..(5): Xaa is C or S
TKPTXAPTKLSATSVLYY

SEQ ID NO: 7603 - protein, 13 aa, Artificial Sequence
  Cyclic GFR-binding peptide
VPTELSPISMLYK

SEQ ID NO: 7604 - protein, 21 aa, Artificial Sequence
  Cyclic GFR-binding peptide
  MOD_RES (6)..(7): Xaa is C or S
TVPKPXXAPTQLSATSVLYYD

SEQ ID NO: 7605 - protein, 16 aa, Artificial Sequence
  Cyclic GFR-binding peptide
LNAISILYFVGRTPKV

SEQ ID NO: 7606 - protein, 21 aa, Artificial Sequence
  Cyclic GFR-binding peptide
  MOD_RES (6)..(7): Xaa is C or S
AVPKAXXAPTKLNAISVLYFD

SEQ ID NO: 7607 - protein, 13 aa, Artificial Sequence
  Cyclic GFR-binding peptide
VPTKLNAISVLYF

SEQ ID NO: 7608 - protein, 17 aa, Artificial Sequence
  Cyclic GFR-binding peptide
ELNAISMLYFDEYDKVV

SEQ ID NO: 7609 - protein, 14 aa, Artificial Sequence
  Cyclic GFR-binding peptide
  MOD_RES (1)..(1): Xaa is C or S
XVSQDLSPISILYK

SEQ ID NO: 7610 - protein, 19 aa, Artificial Sequence
  Cyclic GFR-binding peptide
  MOD_RES (5)..(6): Xaa is C or S
VPKAXXAPTKLNAISVLYF

SEQ ID NO: 7611 - protein, 24 aa, Artificial Sequence
  Cyclic GFR-binding peptide
  MOD_RES (6)..(7): Xaa is C or S
YVPKPXXAPTKLSPISVLYKDDSS

SEQ ID NO: 7612 - protein, 15 aa, Artificial Sequence
  Cyclic GFR-binding peptide
SPISVLYKDSSNNVI

SEQ ID NO: 7613 - protein, 25 aa, Artificial Sequence
  Cyclic GFR-binding peptide
  MOD_RES (6)..(7): Xaa is C or S
ASAAPXXVPQALNAISILYFVGRKP

SEQ ID NO: 7614 - protein, 21 aa, Artificial Sequence
  Cyclic GFR-binding peptide
  MOD_RES (5)..(5): Xaa is C or S
RNVQXRPTQVQLSPISVLYKE

SEQ ID NO: 7615 - protein, 16 aa, Artificial Sequence
  Cyclic GFR-binding peptide
  MOD_RES (1)..(1): Xaa is C or S
XRPTQVQLNAISVLYF

SEQ ID NO: 7616 - protein, 21 aa, Artificial Sequence
  Cyclic GFR-binding peptide
  MOD_RES (6)..(7): Xaa is C or S
YVPKPXXAPTKLSPISVLYKD

SEQ ID NO: 7617 - protein, 15 aa, Artificial Sequence
  Cyclic GFR-binding peptide
SPISMLYKDEYDKVV

SEQ ID NO: 7618 - protein, 27 aa, Artificial Sequence
  Cyclic GFR-binding peptide
  MOD_RES (6)..(7): Xaa is C or S
TVPKPXXAPTQLSAISVLYLDDSSNVI

SEQ ID NO: 7619 - protein, 23 aa, Artificial Sequence
  Cyclic GFR-binding peptide
  MOD_RES (6)..(7): Xaa is C or S
TVPKPXXAPTQLSPISVLYKDDS

SEQ ID NO: 7620 - protein, 19 aa, Artificial Sequence
  Cyclic GFR-binding peptide
  MOD_RES (5)..(6): Xaa is C or S
SASPXXVPQDLNAISILYF

SEQ ID NO: 7621 - protein, 19 aa, Artificial Sequence
  Cyclic GFR-binding peptide
  MOD_RES (5)..(6): Xaa is C or S
VGKAXXVPTKLSAISVLYL

SEQ ID NO: 7622 - protein, 19 aa, Artificial Sequence
  Cyclic GFR-binding peptide
  MOD_RES (5)..(6): Xaa is C or S
VPKAXXAPTKLSPISVLYK

SEQ ID NO: 7623 - protein, 17 aa, Artificial Sequence
  Cyclic GFR-binding peptide
KLSAISVLYLDSSNNVI

SEQ ID NO: 7624 - protein, 16 aa, Artificial Sequence
  Cyclic GFR-binding peptide
  MOD_RES (2)..(3): Xaa is C or S
AXXVPTELNAISMLYF

SEQ ID NO: 7625 - protein, 17 aa, Artificial Sequence
  Cyclic GFR-binding peptide
  MOD_RES (3)..(4): Xaa is C or S
APXXVPQALSATSILYY

SEQ ID NO: 7626 - protein, 27 aa, Artificial Sequence
  Cyclic GFR-binding peptide
  MOD_RES (6)..(7): Xaa is C or S
YVPKPXXAPTKLSAISVLYLDDSSNVI

SEQ ID NO: 7627 - protein, 20 aa, Artificial Sequence
  Cyclic GFR-binding peptide
  MOD_RES (6)..(7): Xaa is C or S
AVPKAXXAPTKLSAISVLYL

SEQ ID NO: 7628 - protein, 22 aa, Artificial Sequence
  Cyclic GFR-binding peptide
  MOD_RES (5)..(5): Xaa is C or S
RNVQXRPTQVQLNAISVLYFEI

SEQ ID NO: 7629 - protein, 19 aa, Artificial Sequence
  Cyclic GFR-binding peptide
PTQLSAISVLYLDDSSNVI

SEQ ID NO: 7630 - protein, 19 aa, Artificial Sequence
  Cyclic GFR-binding peptide
PTKLSATSVLYYDDMGVPT

SEQ ID NO: 7631 - protein, 17 aa, Artificial Sequence
  Cyclic GFR-binding peptide
ELSPISMLYKDEYDKVV

SEQ ID NO: 7632 - protein, 17 aa, Artificial Sequence
  Cyclic GFR-binding peptide
  MOD_RES (3)..(4): Xaa is C or S
APXXVPQALSAISILYL

SEQ ID NO: 7633 - protein, 20 aa, Artificial Sequence
  Cyclic GFR-binding peptide
VQLSATSVLYYEIVRKKPIF

SEQ ID NO: 7634 - protein, 16 aa, Artificial Sequence
  Cyclic GFR-binding peptide
  MOD_RES (3)..(3): Xaa is C or S
PTXAPTKLSAISVLYL

SEQ ID NO: 7635 - protein, 15 aa, Artificial Sequence
  Cyclic GFR-binding peptide
SAISVLYLDSSNNVI

SEQ ID NO: 7636 - protein, 25 aa, Artificial Sequence
  Cyclic GFR-binding peptide
  MOD_RES (6)..(7): Xaa is C or S
ASAAPXXVPQALSPISILYKVGRKP

SEQ ID NO: 7637 - protein, 23 aa, Artificial Sequence
  Cyclic GFR-binding peptide
  MOD_RES (6)..(7): Xaa is C or S
ASASPXXVSQDLNAISILYFIGK

SEQ ID NO: 7638 - protein, 16 aa, Artificial Sequence
  Cyclic GFR-binding peptide
LSAISILYLVGRTPKV

SEQ ID NO: 7639 - protein, 24 aa, Artificial Sequence
  Cyclic GFR-binding peptide
  MOD_RES (6)..(7): Xaa is C or S
ASAAPXXVPQALSAISILYLVGRK

SEQ ID NO: 7640 - protein, 24 aa, Artificial Sequence
  Cyclic GFR-binding peptide
  MOD_RES (6)..(7): Xaa is C or S
AVPKAXXAPTKLSPISVLYKDSSN

SEQ ID NO: 7641 - protein, 17 aa, Artificial Sequence
  Cyclic GFR-binding peptide
DLSPISILYKIGKTPKI

SEQ ID NO: 7642 - protein, 17 aa, Artificial Sequence
  Cyclic GFR-binding peptide
  MOD_RES (3)..(4): Xaa is C or S
KPXXAPTKLSATSVLYY

SEQ ID NO: 7643 - protein, 22 aa, Artificial Sequence
  Cyclic GFR-binding peptide
  MOD_RES (6)..(7): Xaa is C or S
ASAAPXXVPQALNAISILYFVG

SEQ ID NO: 7644 - protein, 25 aa, Artificial Sequence
  Cyclic GFR-binding peptide
  MOD_RES (6)..(7): Xaa is C or S
KVGKAXXVPTKLSATSVLYYDDMGV

SEQ ID NO: 7645 - protein, 15 aa, Artificial Sequence
  Cyclic GFR-binding peptide
SATSVLYYDDSSNVI

SEQ ID NO: 7646 - protein, 20 aa, Artificial Sequence
  Cyclic GFR-binding peptide
  MOD_RES (6)..(7): Xaa is C or S
KVGKAXXVPTKLSAISVLYL

SEQ ID NO: 7647 - protein, 23 aa, Artificial Sequence
  Cyclic GFR-binding peptide
  MOD_RES (7)..(7): Xaa is C or S
HVTKPTXAPTKLSAISVLYLDDS

SEQ ID NO: 7648 - protein, 16 aa, Artificial Sequence
  Cyclic GFR-binding peptide
  MOD_RES (2)..(3): Xaa is C or S
AXXAPTKLSPISVLYK

SEQ ID NO: 7649 - protein, 19 aa, Artificial Sequence
  Cyclic GFR-binding peptide
QLSAISVLYLEIVRKKPIF

SEQ ID NO: 7650 - protein, 24 aa, Artificial Sequence
  Cyclic GFR-binding peptide
  MOD_RES (6)..(7): Xaa is C or S
KIPKAXXVPTELNAISMLYFDENE

SEQ ID NO: 7651 - protein, 19 aa, Artificial Sequence
  Cyclic GFR-binding peptide
PQALNAISILYFVGRKPKV

SEQ ID NO: 7652 - protein, 25 aa, Artificial Sequence
  Cyclic GFR-binding peptide
  MOD_RES (6)..(7): Xaa is C or S
AVPKAXXAPTKLSPISVLYKDSSNN

SEQ ID NO: 7653 - protein, 23 aa, Artificial Sequence
  Cyclic GFR-binding peptide
  MOD_RES (6)..(7): Xaa is C or S
ASASPXXVPQDLSPISILYKVGR

SEQ ID NO: 7654 - protein, 13 aa, Artificial Sequence
  Cyclic GFR-binding peptide
VPTKLSAISVLYL

SEQ ID NO: 7655 - protein, 16 aa, Artificial Sequence
  Cyclic GFR-binding peptide
  MOD_RES (2)..(3): Xaa is C or S
PXXAPTKLSAISVLYL

SEQ ID NO: 7656 - protein, 15 aa, Artificial Sequence
  Cyclic GFR-binding peptide
  MOD_RES (1)..(2): Xaa is C or S
XXVPQDLSATSILYY

SEQ ID NO: 7657 - protein, 15 aa, Artificial Sequence
  Cyclic GFR-binding peptide
NAISMLYFDEYDKVV

SEQ ID NO: 7658 - protein, 20 aa, Artificial Sequence
  Cyclic GFR-binding peptide
  MOD_RES (6)..(7): Xaa is C or S
KVGKAXXVPTKLSATSVLYY

SEQ ID NO: 7659 - protein, 14 aa, Artificial Sequence
  Cyclic GFR-binding peptide
PTQVQLSAISVLYL

SEQ ID NO: 7660 - protein, 18 aa, Artificial Sequence
  Cyclic GFR-binding peptide
TKLSAISVLYLDDMGVPT

SEQ ID NO: 7661 - protein, 16 aa, Artificial Sequence
  Cyclic GFR-binding peptide
LSPISVLYKDDSSNVI

SEQ ID NO: 7662 - protein, 16 aa, Artificial Sequence
  Cyclic GFR-binding peptide
LSPISILYKVGRKPKV

SEQ ID NO: 7663 - protein, 13 aa, Artificial Sequence
  Cyclic GFR-binding peptide
VSQDLNAISILYF

SEQ ID NO: 7664 - protein, 16 aa, Artificial Sequence
  Cyclic GFR-binding peptide
  MOD_RES (2)..(3): Xaa is C or S
PXXVPQDLSPISILYK

SEQ ID NO: 7665 - protein, 15 aa, Artificial Sequence
  Cyclic GFR-binding peptide
  MOD_RES (1)..(2): Xaa is C or S
XXVSQDLSPISILYK

SEQ ID NO: 7666 - protein, 27 aa, Artificial Sequence
  Cyclic GFR-binding peptide
  MOD_RES (6)..(7): Xaa is C or S
TVPKPXXAPTQLSPISVLYKDDSSNVI

SEQ ID NO: 7667 - protein, 26 aa, Artificial Sequence
  Cyclic GFR-binding peptide
  MOD_RES (6)..(7): Xaa is C or S
KIPKAXXVPTELSPISMLYKDENEKV

SEQ ID NO: 7668 - protein, 22 aa, Artificial Sequence
  Cyclic GFR-binding peptide
  MOD_RES (6)..(7): Xaa is C or S
KVGKAXXVPTKLSAISVLYLDD

SEQ ID NO: 7669 - protein, 17 aa, Artificial Sequence
  Cyclic GFR-binding peptide
  MOD_RES (4)..(4): Xaa is C or S
KPTXAPTKLSPISVLYK

SEQ ID NO: 7670 - protein, 19 aa, Artificial Sequence
  Cyclic GFR-binding peptide
PTKLSAISVLYLDDSSNVI

SEQ ID NO: 7671 - protein, 14 aa, Artificial Sequence
  Cyclic GFR-binding peptide
  MOD_RES (1)..(1): Xaa is C or S
XVSQDLSATSILYY

SEQ ID NO: 7672 - protein, 13 aa, Artificial Sequence
  Cyclic GFR-binding peptide
VPTELSATSMLYY

SEQ ID NO: 7673 - protein, 16 aa, Artificial Sequence
  Cyclic GFR-binding peptide
LSPISILYKVGRTPKV

SEQ ID NO: 7674 - protein, 15 aa, Artificial Sequence
  Cyclic GFR-binding peptide
  MOD_RES (1)..(2): Xaa is C or S
XXVPQALSPISILYK

SEQ ID NO: 7675 - protein, 19 aa, Artificial Sequence
  Cyclic GFR-binding peptide
PQALSATSILYYVGRKPKV

SEQ ID NO: 7676 - protein, 24 aa, Artificial Sequence
  Cyclic GFR-binding peptide
  MOD_RES (6)..(7): Xaa is C or S
ASASPXXVPQDLNAISILYFVGRT

SEQ ID NO: 7677 - protein, 19 aa, Artificial Sequence
  Cyclic GFR-binding peptide
QLNAISVLYFEIVRKKPIF

SEQ ID NO: 7678 - protein, 17 aa, Artificial Sequence
  Cyclic GFR-binding peptide
QLSATSVLYYDDSSNVI

SEQ ID NO: 7679 - protein, 16 aa, Artificial Sequence
  Cyclic GFR-binding peptide
  MOD_RES (2)..(3): Xaa is C or S
AXXVPTELSATSMLYY

SEQ ID NO: 7680 - protein, 21 aa, Artificial Sequence
  Cyclic GFR-binding peptide
  MOD_RES (6)..(7): Xaa is C or S
KVGKAXXVPTKLNAISVLYFD

SEQ ID NO: 7681 - protein, 19 aa, Artificial Sequence
  Cyclic GFR-binding peptide
  MOD_RES (5)..(6): Xaa is C or S
SASPXXVSQDLNAISILYF

SEQ ID NO: 7682 - protein, 17 aa, Artificial Sequence
  Cyclic GFR-binding peptide
  MOD_RES (4)..(4): Xaa is C or S
KPTXAPTKLSATSVLYY

SEQ ID NO: 7683 - protein, 21 aa, Artificial Sequence
  Cyclic GFR-binding peptide
  MOD_RES (6)..(7): Xaa is C or S
ASASPXXVSQDLSATSILYYI

SEQ ID NO: 7684 - protein, 17 aa, Artificial Sequence
  Cyclic GFR-binding peptide
KLSATSVLYYDDSSNVI

SEQ ID NO: 7685 - protein, 18 aa, Artificial Sequence
  Cyclic GFR-binding peptide
QALNAISILYFVGRKPKV

SEQ ID NO: 7686 - protein, 16 aa, Artificial Sequence
  Cyclic GFR-binding peptide
LNAISILYFIGKTPKI

SEQ ID NO: 7687 - protein, 18 aa, Artificial Sequence
  Cyclic GFR-binding peptide
  MOD_RES (4)..(5): Xaa is C or S
AAPXXVPQALSPISILYK

SEQ ID NO: 7688 - protein, 13 aa, Artificial Sequence
  Cyclic GFR-binding peptide
VPTKLSATSVLYY

SEQ ID NO: 7689 - protein, 20 aa, Artificial Sequence
  Cyclic GFR-binding peptide
  MOD_RES (6)..(7): Xaa is C or S
YVPKPXXAPTKLSAISVLYL

SEQ ID NO: 7690 - protein, 18 aa, Artificial Sequence
  Cyclic GFR-binding peptide
QALSAISILYLVGRKPKV

SEQ ID NO: 7691 - protein, 25 aa, Artificial Sequence
  Cyclic GFR-binding peptide
  MOD_RES (6)..(7): Xaa is C or S
AVPKAXXAPTKLNAISVLYFDSSNN

SEQ ID NO: 7692 - protein, 25 aa, Artificial Sequence
  Cyclic GFR-binding peptide
  MOD_RES (7)..(7): Xaa is C or S
HVTKPTXAPTKLSPISVLYKDDSSN

SEQ ID NO: 7693 - protein, 20 aa, Artificial Sequence
  Cyclic GFR-binding peptide
  MOD_RES (6)..(7): Xaa is C or S
KVGKAXXVPTKLNAISVLYF

SEQ ID NO: 7694 - protein, 18 aa, Artificial Sequence
  Cyclic GFR-binding peptide
  MOD_RES (4)..(5): Xaa is C or S
PKPXXAPTQLSPISVLYK

SEQ ID NO: 7695 - protein, 18 aa, Artificial Sequence
  Cyclic GFR-binding peptide
TELSATSMLYYDEYDKVV

SEQ ID NO: 7696 - protein, 26 aa, Artificial Sequence
  Cyclic GFR-binding peptide
  MOD_RES (6)..(7): Xaa is C or S
ASASPXXVSQDLSPISILYKIGKTPK

SEQ ID NO: 7697 - protein, 13 aa, Artificial Sequence
  Cyclic GFR-binding peptide
APTQLSPISVLYK

SEQ ID NO: 7698 - protein, 27 aa, Artificial Sequence
  Cyclic GFR-binding peptide
  MOD_RES (6)..(7): Xaa is C or S
ASASPXXVPQDLSPISILYKVGRTPKV

SEQ ID NO: 7699 - protein, 25 aa, Artificial Sequence
  Cyclic GFR-binding peptide
  MOD_RES (6)..(7): Xaa is C or S
ASASPXXVPQDLSAISILYLVGRTP

SEQ ID NO: 7700 - protein, 23 aa, Artificial Sequence
  Cyclic GFR-binding peptide
  MOD_RES (6)..(7): Xaa is C or S
YVPKPXXAPTKLSATSVLYYDDS

SEQ ID NO: 7701 - protein, 24 aa, Artificial Sequence
  Cyclic GFR-binding peptide
  MOD_RES (6)..(7): Xaa is C or S
AVPKAXXAPTKLNAISVLYFDSSN

SEQ ID NO: 7702 - protein, 14 aa, Artificial Sequence
  Cyclic GFR-binding peptide
  MOD_RES (1)..(1): Xaa is C or S
XVPQALSATSILYY

SEQ ID NO: 7703 - protein, 25 aa, Artificial Sequence
  Cyclic GFR-binding peptide
  MOD_RES (6)..(7): Xaa is C or S
ASAAPXXVPQALSAISILYLVGRKP

SEQ ID NO: 7704 - protein, 26 aa, Artificial Sequence
  Cyclic GFR-binding peptide
  MOD_RES (6)..(7): Xaa is C or S
KIPKAXXVPTELSATSMLYYDENEKV

SEQ ID NO: 7705 - protein, 22 aa, Artificial Sequence
  Cyclic GFR-binding peptide
  MOD_RES (6)..(7): Xaa is C or S
KIPKAXXVPTELNAISMLYFDE

SEQ ID NO: 7706 - protein, 20 aa, Artificial Sequence
  Cyclic GFR-binding peptide
  MOD_RES (6)..(7): Xaa is C or S
ASAAPXXVPQALSATSILYY

SEQ ID NO: 7707 - protein, 25 aa, Artificial Sequence
  Cyclic GFR-binding peptide
  MOD_RES (7)..(7): Xaa is C or S
HVTKPTXAPTKLSATSVLYYDDSSN

SEQ ID NO: 7708 - protein, 18 aa, Artificial Sequence
  Cyclic GFR-binding peptide
  MOD_RES (4)..(5): Xaa is C or S
PKPXXAPTKLSATSVLYY

SEQ ID NO: 7709 - protein, 14 aa, Artificial Sequence
  Cyclic GFR-binding peptide
  MOD_RES (1)..(1): Xaa is C or S
XVPQDLSPISILYK

SEQ ID NO: 7710 - protein, 23 aa, Artificial Sequence
  Cyclic GFR-binding peptide
  MOD_RES (6)..(7): Xaa is C or S
TVPKPXXAPTQLSATSVLYYDDS

SEQ ID NO: 7711 - protein, 27 aa, Artificial Sequence
  Cyclic GFR-binding peptide
  MOD_RES (6)..(7): Xaa is C or S
ASAAPXXVPQALSATSILYYVGRKPKV

SEQ ID NO: 7712 - protein, 15 aa, Artificial Sequence
  Cyclic GFR-binding peptide
  MOD_RES (1)..(2): Xaa is C or S
XXVPQDLSPISILYK

SEQ ID NO: 7713 - protein, 23 aa, Artificial Sequence
  Cyclic GFR-binding peptide
  MOD_RES (6)..(7): Xaa is C or S
YVPKPXXAPTKLSPISVLYKDDS

SEQ ID NO: 7714 - protein, 17 aa, Artificial Sequence
  Cyclic GFR-binding peptide
  MOD_RES (2)..(2): Xaa is C or S
QXRPTQVQLNAISVLYF

SEQ ID NO: 7715 - protein, 13 aa, Artificial Sequence
  Cyclic GFR-binding peptide
VPTELNAISMLYF

SEQ ID NO: 7716 - protein, 20 aa, Artificial Sequence
  Cyclic GFR-binding peptide
  MOD_RES (6)..(7): Xaa is C or S
ASAAPXXVPQALSPISILYK

SEQ ID NO: 7717 - protein, 23 aa, Artificial Sequence
  Cyclic GFR-binding peptide
  MOD_RES (6)..(7): Xaa is C or S
KIPKAXXVPTELSPISMLYKDEN

SEQ ID NO: 7718 - protein, 18 aa, Artificial Sequence
  Cyclic GFR-binding peptide
  MOD_RES (4)..(5): Xaa is C or S
PKPXXAPTQLSATSVLYY

SEQ ID NO: 7719 - protein, 17 aa, Artificial Sequence
  Cyclic GFR-binding peptide
  MOD_RES (3)..(4): Xaa is C or S
KPXXAPTQLSATSVLYY

SEQ ID NO: 7720 - protein, 15 aa, Artificial Sequence
  Cyclic GFR-binding peptide
SATSILYYVGRTPKV

SEQ ID NO: 7721 - protein, 25 aa, Artificial Sequence
  Cyclic GFR-binding peptide
  MOD_RES (5)..(5): Xaa is C or S
RNVQXRPTQVQLSAISVLYLEIVRK

SEQ ID NO: 7722 - protein, 22 aa, Artificial Sequence
  Cyclic GFR-binding peptide
  MOD_RES (5)..(5): Xaa is C or S
RNVQXRPTQVQLSATSVLYYEI

SEQ ID NO: 7723 - protein, 17 aa, Artificial Sequence
  Cyclic GFR-binding peptide
ELSATSMLYYDENEKVV

SEQ ID NO: 7724 - protein, 16 aa, Artificial Sequence
  Cyclic GFR-binding peptide
  MOD_RES (2)..(3): Xaa is C or S
AXXVPTKLSATSVLYY

SEQ ID NO: 7725 - protein, 26 aa, Artificial Sequence
  Cyclic GFR-binding peptide
  MOD_RES (6)..(7): Xaa is C or S
ASASPXXVPQDLSPISILYKVGRTPK

SEQ ID NO: 7726 - protein, 17 aa, Artificial Sequence
  Cyclic GFR-binding peptide
  MOD_RES (3)..(4): Xaa is C or S
KPXXAPTKLSPISVLYK

SEQ ID NO: 7727 - protein, 21 aa, Artificial Sequence
  Cyclic GFR-binding peptide
  MOD_RES (6)..(7): Xaa is C or S
KVGKAXXVPTKLSAISVLYLD

SEQ ID NO: 7728 - protein, 17 aa, Artificial Sequence
  Cyclic GFR-binding peptide
  MOD_RES (3)..(4): Xaa is C or S
KPXXAPTQLSPISVLYK

SEQ ID NO: 7729 - protein, 16 aa, Artificial Sequence
  Cyclic GFR-binding peptide
LSATSVLYYDDMGVPT

SEQ ID NO: 7730 - protein, 16 aa, Artificial Sequence
  Cyclic GFR-binding peptide
LNAISILYFVGRKPKV

SEQ ID NO: 7731 - protein, 14 aa, Artificial Sequence
  Cyclic GFR-binding peptide
  MOD_RES (1)..(1): Xaa is C or S
XVPQDLSATSILYY

SEQ ID NO: 7732 - protein, 14 aa, Artificial Sequence
  Cyclic GFR-binding peptide
  MOD_RES (1)..(1): Xaa is C or S
XVPQALSPISILYK

SEQ ID NO: 7733 - protein, 18 aa, Artificial Sequence
  Cyclic GFR-binding peptide
  MOD_RES (3)..(3): Xaa is C or S
VQXRPTQVQLSPISVLYK

SEQ ID NO: 7734 - protein, 29 aa, Artificial Sequence
  Cyclic GFR-binding peptide
  MOD_RES (5)..(5): Xaa is C or S
RNVQXRPTQVQLSATSVLYYEIVRKKPIF

SEQ ID NO: 7735 - protein, 21 aa, Artificial Sequence
  Cyclic GFR-binding peptide
  MOD_RES (5)..(5): Xaa is C or S
RNVQXRPTQVQLNAISVLYFE

SEQ ID NO: 7736 - protein, 18 aa, Artificial Sequence
  Cyclic GFR-binding peptide
QALSPISILYKVGRKPKV

SEQ ID NO: 7737 - protein, 20 aa, Artificial Sequence
  Cyclic GFR-binding peptide
  MOD_RES (5)..(5): Xaa is C or S
RNVQXRPTQVQLSPISVLYK

SEQ ID NO: 7738 - protein, 18 aa, Artificial Sequence
  Cyclic GFR-binding peptide
  MOD_RES (5)..(5): Xaa is C or S
TKPTXAPTKLSPISVLYK

SEQ ID NO: 7739 - protein, 23 aa, Artificial Sequence
  Cyclic GFR-binding peptide
  MOD_RES (6)..(7): Xaa is C or S
ASAAPXXVPQALNAISILYFVGR

SEQ ID NO: 7740 - protein, 18 aa, Artificial Sequence
  Cyclic GFR-binding peptide
  MOD_RES (4)..(5): Xaa is C or S
PKPXXAPTKLSPISVLYK

SEQ ID NO: 7741 - protein, 26 aa, Artificial Sequence
  Cyclic GFR-binding peptide
  MOD_RES (6)..(7): Xaa is C or S
AVPKAXXAPTKLNAISVLYFDSSNNV

SEQ ID NO: 7742 - protein, 21 aa, Artificial Sequence
  Cyclic GFR-binding peptide
  MOD_RES (7)..(7): Xaa is C or S
HVTKPTXAPTKLSAISVLYLD

SEQ ID NO: 7743 - protein, 15 aa, Artificial Sequence
  Cyclic GFR-binding peptide
NAISMLYFDENEKVV

SEQ ID NO: 7744 - protein, 13 aa, Artificial Sequence
  Cyclic GFR-binding peptide
APTKLSPISVLYK

SEQ ID NO: 7745 - protein, 18 aa, Artificial Sequence
  Cyclic GFR-binding peptide
TKLNAISVLYFDDMGVPT

SEQ ID NO: 7746 - protein, 18 aa, Artificial Sequence
  Cyclic GFR-binding peptide
LSAISVLYLEIVRKKPIF

SEQ ID NO: 7747 - protein, 26 aa, Artificial Sequence
  Cyclic GFR-binding peptide
  MOD_RES (6)..(7): Xaa is C or S
KVGKAXXVPTKLSATSVLYYDDMGVP

SEQ ID NO: 7748 - protein, 13 aa, Artificial Sequence
  Cyclic GFR-binding peptide
APTQLSATSVLYY

SEQ ID NO: 7749 - protein, 23 aa, Artificial Sequence
  Cyclic GFR-binding peptide
  MOD_RES (6)..(7): Xaa is C or S
KVGKAXXVPTKLNAISVLYFDDM

SEQ ID NO: 7750 - protein, 27 aa, Artificial Sequence
  Cyclic GFR-binding peptide
  MOD_RES (7)..(7): Xaa is C or S
HVTKPTXAPTKLSATSVLYYDDSSNVI

SEQ ID NO: 7751 - protein, 17 aa, Artificial Sequence
  Cyclic GFR-binding peptide
KLSPISVLYKDSSNNVI

SEQ ID NO: 7752 - protein, 24 aa, Artificial Sequence
  Cyclic GFR-binding peptide
  MOD_RES (6)..(7): Xaa is C or S
ASAAPXXVPQALNAISILYFVGRK

SEQ ID NO: 7753 - protein, 13 aa, Artificial Sequence
  Cyclic GFR-binding peptide
IFLVSIPSLKTPA

SEQ ID NO: 7754 - protein, 20 aa, Artificial Sequence
  Cyclic GFR-binding peptide
  MOD_RES (14)..(14): Xaa is C or S
IFLVSIPSLKTPAXTPKTVH

SEQ ID NO: 7755 - protein, 27 aa, Artificial Sequence
  Cyclic GFR-binding peptide
  MOD_RES (21)..(22): Xaa is C or S
VVKDYEDYYVMPLPELETPVXXAKPIS

SEQ ID NO: 7756 - protein, 23 aa, Artificial Sequence
  Cyclic GFR-binding peptide
  MOD_RES (17)..(18): Xaa is C or S
SDDYYVVPLPELKTPAXXPKPVY

SEQ ID NO: 7757 - protein, 24 aa, Artificial Sequence
  Cyclic GFR-binding peptide
  MOD_RES (18)..(19): Xaa is C or S
NASDLYLISIASLRTPVXXTPPTS

SEQ ID NO: 7758 - protein, 26 aa, Artificial Sequence
  Cyclic GFR-binding peptide
  MOD_RES (20)..(21): Xaa is C or S
VNSSDDIFLVSIPSLKTPAXXPKPVY

SEQ ID NO: 7759 - protein, 19 aa, Artificial Sequence
  Cyclic GFR-binding peptide
  MOD_RES (14)..(15): Xaa is C or S
YYLVTLPELKTPAXXPKPV

SEQ ID NO: 7760 - protein, 15 aa, Artificial Sequence
  Cyclic GFR-binding peptide
VKPTRGVIFLISIPS

SEQ ID NO: 7761 - protein, 24 aa, Artificial Sequence
  Cyclic GFR-binding peptide
  MOD_RES (18)..(19): Xaa is C or S
SSDDIFLVSIPSLKTPAXXPKPVY

SEQ ID NO: 7762 - protein, 26 aa, Artificial Sequence
  Cyclic GFR-binding peptide
  MOD_RES (20)..(20): Xaa is C or S
VNSSDDIFLVSIPSLKTPAXTPKTVH

SEQ ID NO: 7763 - protein, 20 aa, Artificial Sequence
  Cyclic GFR-binding peptide
  MOD_RES (14)..(15): Xaa is C or S
IFLMSIPSLETPVXXAKPIS

SEQ ID NO: 7764 - protein, 19 aa, Artificial Sequence
  Cyclic GFR-binding peptide
  MOD_RES (14)..(15): Xaa is C or S
YYVVPLPELKTPAXXPKPV

SEQ ID NO: 7765 - protein, 26 aa, Artificial Sequence
  Cyclic GFR-binding peptide
  MOD_RES (20)..(21): Xaa is C or S
VNSSDDYYLVTLPELQTPAXXPKPVT

SEQ ID NO: 7766 - protein, 23 aa, Artificial Sequence
  Cyclic GFR-binding peptide
  MOD_RES (17)..(18): Xaa is C or S
KGIIFLISIPSLDQSVXXPSASA

SEQ ID NO: 7767 - protein, 16 aa, Artificial Sequence
  Cyclic GFR-binding peptide
  MOD_RES (14)..(15): Xaa is C or S
YYVIPLPELDQPVXXP

SEQ ID NO: 7768 - protein, 20 aa, Artificial Sequence
  Cyclic GFR-binding peptide
  MOD_RES (14)..(15): Xaa is C or S
YYVIPLPELDQSVXXPSASA

SEQ ID NO: 7769 - protein, 20 aa, Artificial Sequence
  Cyclic GFR-binding peptide
  MOD_RES (14)..(15): Xaa is C or S
LYLISIASLRTPVXXTPPTS

SEQ ID NO: 7770 - protein, 17 aa, Artificial Sequence
  Cyclic GFR-binding peptide
VKPTRGVYYVIPLPELD

SEQ ID NO: 7771 - protein, 16 aa, Artificial Sequence
  Cyclic GFR-binding peptide
IKPTKGIIFLISIPSL

SEQ ID NO: 7772 - protein, 18 aa, Artificial Sequence
  Cyclic GFR-binding peptide
VVKENEDIFLMSIPSLET

SEQ ID NO: 7773 - protein, 15 aa, Artificial Sequence
  Cyclic GFR-binding peptide
VVNNASDFYLISIAN

SEQ ID NO: 7774 - protein, 19 aa, Artificial Sequence
  Cyclic GFR-binding peptide
IVNSSDDYYVVPLPELKTP

SEQ ID NO: 7775 - protein, 14 aa, Artificial Sequence
  Cyclic GFR-binding peptide
  MOD_RES (14)..(14): Xaa is C or S
YYVIPLPELRTPVX

SEQ ID NO: 7776 - protein, 19 aa, Artificial Sequence
  Cyclic GFR-binding peptide
IVNSSDDYYVVPLPELQTP

SEQ ID NO: 7777 - protein, 15 aa, Artificial Sequence
  Cyclic GFR-binding peptide
VVNNASDLYLISIAS

SEQ ID NO: 7778 - protein, 20 aa, Artificial Sequence
  Cyclic GFR-binding peptide
  MOD_RES (14)..(15): Xaa is C or S
YYLMTLPELETPVXXAKPIK

SEQ ID NO: 7779 - protein, 15 aa, Artificial Sequence
  Cyclic GFR-binding peptide
VVKDYEDYYLMTLPE

SEQ ID NO: 7780 - protein, 15 aa, Artificial Sequence
  Cyclic GFR-binding peptide
  MOD_RES (14)..(15): Xaa is C or S
YYVVPLPELKTPAXX

SEQ ID NO: 7781 - protein, 15 aa, Artificial Sequence
  Cyclic GFR-binding peptide
  MOD_RES (14)..(14): Xaa is C or S
IFLVSIPSLKTPAXT

SEQ ID NO: 7782 - protein, 24 aa, Artificial Sequence
  Cyclic GFR-binding peptide
  MOD_RES (18)..(19): Xaa is C or S
KRGVIFLISIPSLAQPVXXPAASA

SEQ ID NO: 7783 - protein, 13 aa, Artificial Sequence
  Cyclic GFR-binding peptide
YYVVPLPELKTPA

SEQ ID NO: 7784 - protein, 20 aa, Artificial Sequence
  Cyclic GFR-binding peptide
  MOD_RES (14)..(15): Xaa is C or S
YYVMPLPELETPVXXAKPIS

SEQ ID NO: 7785 - protein, 27 aa, Artificial Sequence
  Cyclic GFR-binding peptide
  MOD_RES (21)..(22): Xaa is C or S
IVNSSDDIFLVSIPSLQTPAXXPKPVT

SEQ ID NO: 7786 - protein, 14 aa, Artificial Sequence
  Cyclic GFR-binding peptide
  MOD_RES (14)..(14): Xaa is C or S
YYLITLPELRTPVX

SEQ ID NO: 7787 - protein, 18 aa, Artificial Sequence
  Cyclic GFR-binding peptide
VVNNASDFYLISIANLRT

SEQ ID NO: 7788 - protein, 14 aa, Artificial Sequence
  Cyclic GFR-binding peptide
  MOD_RES (14)..(14): Xaa is C or S
YYLVTLPELKTPAX

SEQ ID NO: 7789 - protein, 19 aa, Artificial Sequence
  Cyclic GFR-binding peptide
VKPKRGVYYLITLPELAQP

SEQ ID NO: 7790 - protein, 19 aa, Artificial Sequence
  Cyclic GFR-binding peptide
  MOD_RES (14)..(14): Xaa is C or S
YYLVTLPELKTPAXTPKTV

SEQ ID NO: 7791 - protein, 15 aa, Artificial Sequence
  Cyclic GFR-binding peptide
  MOD_RES (14)..(14): Xaa is C or S
YYVVPLPELKTPAXT

SEQ ID NO: 7792 - protein, 24 aa, Artificial Sequence
  Cyclic GFR-binding peptide
  MOD_RES (18)..(18): Xaa is C or S
SSDDYYLVTLPELKTPAXTPKTVH

SEQ ID NO: 7793 - protein, 22 aa, Artificial Sequence
  Cyclic GFR-binding peptide
  MOD_RES (16)..(17): Xaa is C or S
GVYYLITLPELAQPVXXPAASA

SEQ ID NO: 7794 - protein, 20 aa, Artificial Sequence
  Cyclic GFR-binding peptide
  MOD_RES (14)..(15): Xaa is C or S
IFLISIPSLDQSVXXPSASA

SEQ ID NO: 7795 - protein, 18 aa, Artificial Sequence
  Cyclic GFR-binding peptide
VKPKRGVYYLITLPELAQ

SEQ ID NO: 7796 - protein, 22 aa, Artificial Sequence
  Cyclic GFR-binding peptide
  MOD_RES (16)..(17): Xaa is C or S
EDYYVMPLPELETPVXXAKPIK

SEQ ID NO: 7797 - protein, 18 aa, Artificial Sequence
  Cyclic GFR-binding peptide
  MOD_RES (14)..(15): Xaa is C or S
IFLISIPSLDQPVXXPSA

SEQ ID NO: 7798 - protein, 20 aa, Artificial Sequence
  Cyclic GFR-binding peptide
  MOD_RES (14)..(14): Xaa is C or S
YYVVPLPELKTPAXTPKTVH

SEQ ID NO: 7799 - protein, 16 aa, Artificial Sequence
  Cyclic GFR-binding peptide
VKPKRGVIFLISIPSL

SEQ ID NO: 7800 - protein, 26 aa, Artificial Sequence
  Cyclic GFR-binding peptide
  MOD_RES (20)..(21): Xaa is C or S
VKENEDYYVMPLPELETPVXXAKPIK

SEQ ID NO: 7801 - protein, 23 aa, Artificial Sequence
  Cyclic GFR-binding peptide
  MOD_RES (17)..(18): Xaa is C or S
RGVIFLISIPSLDQPVXXPSASA

SEQ ID NO: 7802 - protein, 16 aa, Artificial Sequence
  Cyclic GFR-binding peptide
  MOD_RES (14)..(15): Xaa is C or S
IFLISIPSLDQPVXXP

SEQ ID NO: 7803 - protein, 22 aa, Artificial Sequence
  Cyclic GFR-binding peptide
  MOD_RES (16)..(17): Xaa is C or S
SDYYVIPLPELRTPVXXTPPTS

SEQ ID NO: 7804 - protein, 17 aa, Artificial Sequence
  Cyclic GFR-binding peptide
  MOD_RES (14)..(15): Xaa is C or S
YYLMTLPELETPVXXAK

SEQ ID NO: 7805 - protein, 19 aa, Artificial Sequence
  Cyclic GFR-binding peptide
IKPTKGIIFLISIPSLDQS

SEQ ID NO: 7806 - protein, 22 aa, Artificial Sequence
  Cyclic GFR-binding peptide
  MOD_RES (16)..(16): Xaa is C or S
DDYYVVPLPELKTPAXTPKTVH

SEQ ID NO: 7807 - protein, 25 aa, Artificial Sequence
  Cyclic GFR-binding peptide
  MOD_RES (19)..(20): Xaa is C or S
KENEDYYLMTLPELETPVXXAKPIK

SEQ ID NO: 7808 - protein, 18 aa, Artificial Sequence
  Cyclic GFR-binding peptide
  MOD_RES (14)..(15): Xaa is C or S
IFLISIPSLAQPVXXPAA

SEQ ID NO: 7809 - protein, 16 aa, Artificial Sequence
  Cyclic GFR-binding peptide
VVNNASDLYLISIASL

SEQ ID NO: 7810 - protein, 21 aa, Artificial Sequence
  Cyclic GFR-binding peptide
  MOD_RES (15)..(16): Xaa is C or S
DYYVVPLPELKTPAXXPKPVY

SEQ ID NO: 7811 - protein, 16 aa, Artificial Sequence
  Cyclic GFR-binding peptide
VVKDYEDYYLMTLPEL

SEQ ID NO: 7812 - protein, 25 aa, Artificial Sequence
  Cyclic GFR-binding peptide
  MOD_RES (19)..(20): Xaa is C or S
NNASDFYLISIANLRTPVXXTPPTS

SEQ ID NO: 7813 - protein, 25 aa, Artificial Sequence
  Cyclic GFR-binding peptide
  MOD_RES (19)..(20): Xaa is C or S
KENEDYYVMPLPELETPVXXAKPIK

SEQ ID NO: 7814 - protein, 17 aa, Artificial Sequence
  Cyclic GFR-binding peptide
IVNSSDDYYVVPLPELQ

SEQ ID NO: 7815 - protein, 17 aa, Artificial Sequence
  Cyclic GFR-binding peptide
IKPTKGIYYVIPLPELD

SEQ ID NO: 7816 - protein, 27 aa, Artificial Sequence
  Cyclic GFR-binding peptide
  MOD_RES (21)..(22): Xaa is C or S
VKPKRGVIFLISIPSLAQPVXXPAASA

SEQ ID NO: 7817 - protein, 17 aa, Artificial Sequence
  Cyclic GFR-binding peptide
IVNSSDDYYVVPLPELK

SEQ ID NO: 7818 - protein, 23 aa, Artificial Sequence
  Cyclic GFR-binding peptide
  MOD_RES (17)..(18): Xaa is C or S
ASDYYVIPLPELRTPVXXTPPTS

SEQ ID NO: 7819 - protein, 15 aa, Artificial Sequence
  Cyclic GFR-binding peptide
IKPTKGIYYVIPLPE

SEQ ID NO: 7820 - protein, 27 aa, Artificial Sequence
  Cyclic GFR-binding peptide
  MOD_RES (21)..(22): Xaa is C or S
VVNNASDYYVIPLPELRTPVXXTPPTS

SEQ ID NO: 7821 - protein, 21 aa, Artificial Sequence
  Cyclic GFR-binding peptide
  MOD_RES (15)..(16): Xaa is C or S
DYYVVPLPELQTPAXXPKPVT

SEQ ID NO: 7822 - protein, 15 aa, Artificial Sequence
  Cyclic GFR-binding peptide
  MOD_RES (14)..(15): Xaa is C or S
YYVIPLPELRTPVXX

SEQ ID NO: 7823 - protein, 24 aa, Artificial Sequence
  Cyclic GFR-binding peptide
  MOD_RES (18)..(19): Xaa is C or S
NASDYYVIPLPELRTPVXXTPPTS

SEQ ID NO: 7824 - protein, 19 aa, Artificial Sequence
  Cyclic GFR-binding peptide
VVKDYEDYYLMTLPELETP

SEQ ID NO: 7825 - protein, 24 aa, Artificial Sequence
  Cyclic GFR-binding peptide
  MOD_RES (18)..(19): Xaa is C or S
TRGVYYVIPLPELDQPVXXPSASA

SEQ ID NO: 7826 - protein, 25 aa, Artificial Sequence
  Cyclic GFR-binding peptide
  MOD_RES (19)..(20): Xaa is C or S
PTRGVIFLISIPSLDQPVXXPSASA

SEQ ID NO: 7827 - protein, 27 aa, Artificial Sequence
  Cyclic GFR-binding peptide
  MOD_RES (21)..(22): Xaa is C or S
VVKENEDYYLMTLPELETPVXXAKPIK

SEQ ID NO: 7828 - protein, 16 aa, Artificial Sequence
  Cyclic GFR-binding peptide
  MOD_RES (14)..(15): Xaa is C or S
YYVIPLPELDQSVXXP

SEQ ID NO: 7829 - protein, 20 aa, Artificial Sequence
  Cyclic GFR-binding peptide
  MOD_RES (14)..(15): Xaa is C or S
YYLMTLPELETPVXXAKPIS

SEQ ID NO: 7830 - protein, 22 aa, Artificial Sequence
  Cyclic GFR-binding peptide
  MOD_RES (16)..(17): Xaa is C or S
EDYYLMTLPELETPVXXAKPIK

SEQ ID NO: 7831 - protein, 25 aa, Artificial Sequence
  Cyclic GFR-binding peptide
  MOD_RES (19)..(20): Xaa is C or S
NSSDDYYLVTLPELQTPAXXPKPVT

SEQ ID NO: 7832 - protein, 18 aa, Artificial Sequence
  Cyclic GFR-binding peptide
VKPTRGVYYVIPLPELDQ

SEQ ID NO: 7833 - protein, 27 aa, Artificial Sequence
  Cyclic GFR-binding peptide
  MOD_RES (21)..(22): Xaa is C or S
IVNSSDDIFLVSIPSLKTPAXXPKPVY

SEQ ID NO: 7834 - protein, 14 aa, Artificial Sequence
  Cyclic GFR-binding peptide
  MOD_RES (14)..(14): Xaa is C or S
IFLVSIPSLKTPAX

SEQ ID NO: 7835 - protein, 27 aa, Artificial Sequence
  Cyclic GFR-binding peptide
  MOD_RES (21)..(21): Xaa is C or S
IVNSSDDYYVVPLPELKTPAXTPKTVH

SEQ ID NO: 7836 - protein, 26 aa, Artificial Sequence
  Cyclic GFR-binding peptide
  MOD_RES (20)..(21): Xaa is C or S
VNSSDDYYLVTLPELKTPAXXPKPVY

SEQ ID NO: 7837 - protein, 15 aa, Artificial Sequence
  Cyclic GFR-binding peptide
  MOD_RES (14)..(15): Xaa is C or S
YYLITLPELRTPVXX

SEQ ID NO: 7838 - protein, 16 aa, Artificial Sequence
  Cyclic GFR-binding peptide
  MOD_RES (14)..(15): Xaa is C or S
IFLVSIPSLQTPAXXP

SEQ ID NO: 7839 - protein, 19 aa, Artificial Sequence
  Cyclic GFR-binding peptide
  MOD_RES (14)..(15): Xaa is C or S
IFLVSIPSLKTPAXXPKPV

SEQ ID NO: 7840 - protein, 24 aa, Artificial Sequence
  Cyclic GFR-binding peptide
  MOD_RES (18)..(19): Xaa is C or S
ENEDYYVMPLPELETPVXXAKPIK

SEQ ID NO: 7841 - protein, 16 aa, Artificial Sequence
  Cyclic GFR-binding peptide
IVNSSDDYYVVPLPEL

SEQ ID NO: 7842 - protein, 26 aa, Artificial Sequence
  Cyclic GFR-binding peptide
  MOD_RES (20)..(21): Xaa is C or S
VNNASDYYVIPLPELRTPVXXTPPTS

SEQ ID NO: 7843 - protein, 25 aa, Artificial Sequence
  Cyclic GFR-binding peptide
  MOD_RES (19)..(20): Xaa is C or S
NNASDLYLISIASLRTPVXXTPPTS

SEQ ID NO: 7844 - protein, 19 aa, Artificial Sequence
  Cyclic GFR-binding peptide
  MOD_RES (14)..(15): Xaa is C or S
YYVIPLPELRTPVXXTPPT

SEQ ID NO: 7845 - protein, 23 aa, Artificial Sequence
  Cyclic GFR-binding peptide
  MOD_RES (17)..(18): Xaa is C or S
YEDYYLMTLPELETPVXXAKPIS

SEQ ID NO: 7846 - protein, 23 aa, Artificial Sequence
  Cyclic GFR-binding peptide
  MOD_RES (17)..(18): Xaa is C or S
KGIYYVIPLPELDQSVXXPSASA

SEQ ID NO: 7847 - protein, 17 aa, Artificial Sequence
  Cyclic GFR-binding peptide
VVKDYEDYYLMTLPELE

SEQ ID NO: 7848 - protein, 15 aa, Artificial Sequence
  Cyclic GFR-binding peptide
  MOD_RES (14)..(15): Xaa is C or S
IFLVSIPSLKTPAXX

SEQ ID NO: 7849 - protein, 23 aa, Artificial Sequence
  Cyclic GFR-binding peptide
  MOD_RES (17)..(18): Xaa is C or S
YEDYYVMPLPELETPVXXAKPIS

SEQ ID NO: 7850 - protein, 21 aa, Artificial Sequence
  Cyclic GFR-binding peptide
  MOD_RES (15)..(16): Xaa is C or S
VYYVIPLPELDQPVXXPSASA

SEQ ID NO: 7851 - protein, 19 aa, Artificial Sequence
  Cyclic GFR-binding peptide
VVNNASDFYLISIANLRTP

SEQ ID NO: 7852 - protein, 18 aa, Artificial Sequence
  Cyclic GFR-binding peptide
  MOD_RES (14)..(15): Xaa is C or S
IFLVSIPSLKTPAXXPKP

SEQ ID NO: 7853 - protein, 22 aa, Artificial Sequence
  Cyclic GFR-binding peptide
  MOD_RES (16)..(17): Xaa is C or S
GIYYVIPLPELDQSVXXPSASA

SEQ ID NO: 7854 - protein, 22 aa, Artificial Sequence
  Cyclic GFR-binding peptide
  MOD_RES (16)..(16): Xaa is C or S
DDIFLVSIPSLKTPAXTPKTVH

SEQ ID NO: 7855 - protein, 18 aa, Artificial Sequence
  Cyclic GFR-binding peptide
  MOD_RES (14)..(15): Xaa is C or S
IFLVSIPSLQTPAXXPKP

SEQ ID NO: 7856 - protein, 18 aa, Artificial Sequence
  Cyclic GFR-binding peptide
VVNNASDLYLISIASLRT

SEQ ID NO: 7857 - protein, 19 aa, Artificial Sequence
  Cyclic GFR-binding peptide
  MOD_RES (14)..(14): Xaa is C or S
IFLVSIPSLKTPAXTPKTV

SEQ ID NO: 7858 - protein, 15 aa, Artificial Sequence
  Cyclic GFR-binding peptide
VVNNASDYYVIPLPE

SEQ ID NO: 7859 - protein, 21 aa, Artificial Sequence
  Cyclic GFR-binding peptide
  MOD_RES (15)..(16): Xaa is C or S
DIFLMSIPSLETPVXXAKPIK

SEQ ID NO: 7860 - protein, 18 aa, Artificial Sequence
  Cyclic GFR-binding peptide
IVNSSDDYYLVTLPELQT

SEQ ID NO: 7861 - protein, 22 aa, Artificial Sequence
  Cyclic GFR-binding peptide
  MOD_RES (16)..(17): Xaa is C or S
DDYYLVTLPELKTPAXXPKPVY

SEQ ID NO: 7862 - protein, 19 aa, Artificial Sequence
  Cyclic GFR-binding peptide
VVKENEDIFLMSIPSLETP

SEQ ID NO: 7863 - protein, 24 aa, Artificial Sequence
  Cyclic GFR-binding peptide
  MOD_RES (18)..(19): Xaa is C or S
SSDDIFLVSIPSLQTPAXXPKPVT

SEQ ID NO: 7864 - protein, 23 aa, Artificial Sequence
  Cyclic GFR-binding peptide
  MOD_RES (17)..(18): Xaa is C or S
RGVYYVIPLPELDQPVXXPSASA

SEQ ID NO: 7865 - protein, 18 aa, Artificial Sequence
  Cyclic GFR-binding peptide
IVNSSDDYYLVTLPELKT

SEQ ID NO: 7866 - protein, 21 aa, Artificial Sequence
  Cyclic GFR-binding peptide
  MOD_RES (15)..(16): Xaa is C or S
DYYVMPLPELETPVXXAKPIS

SEQ ID NO: 7867 - protein, 13 aa, Artificial Sequence
  Cyclic GFR-binding peptide
YYVIPLPELRTPV

SEQ ID NO: 7868 - protein, 20 aa, Artificial Sequence
  Cyclic GFR-binding peptide
  MOD_RES (14)..(15): Xaa is C or S
IFLMSIPSLETPVXXAKPIK

SEQ ID NO: 7869 - protein, 15 aa, Artificial Sequence
  Cyclic GFR-binding peptide
  MOD_RES (14)..(14): Xaa is C or S
YYLVTLPELKTPAXT

SEQ ID NO: 7870 - protein, 25 aa, Artificial Sequence
  Cyclic GFR-binding peptide
  MOD_RES (19)..(20): Xaa is C or S
NSSDDYYVVPLPELKTPAXXPKPVY

SEQ ID NO: 7871 - protein, 24 aa, Artificial Sequence
  Cyclic GFR-binding peptide
  MOD_RES (18)..(19): Xaa is C or S
NASDFYLISIANLRTPVXXTPPTS

SEQ ID NO: 7872 - protein, 18 aa, Artificial Sequence
  Cyclic GFR-binding peptide
  MOD_RES (14)..(15): Xaa is C or S
IFLISIPSLDQSVXXPSA

SEQ ID NO: 7873 - protein, 22 aa, Artificial Sequence
  Cyclic GFR-binding peptide
  MOD_RES (16)..(17): Xaa is C or S
GVYYVIPLPELDQPVXXPSASA

SEQ ID NO: 7874 - protein, 17 aa, Artificial Sequence
  Cyclic GFR-binding peptide
VVKENEDIFLMSIPSLE

SEQ ID NO: 7875 - protein, 19 aa, Artificial Sequence
  Cyclic GFR-binding peptide
IKPTKGIYYVIPLPELDQS

SEQ ID NO: 7876 - protein, 18 aa, Artificial Sequence
  Cyclic GFR-binding peptide
  MOD_RES (14)..(15): Xaa is C or S
YYLVTLPELKTPAXXPKP

SEQ ID NO: 7877 - protein, 18 aa, Artificial Sequence
  Cyclic GFR-binding peptide
VVKENEDYYVMPLPELET

SEQ ID NO: 7878 - protein, 21 aa, Artificial Sequence
  Cyclic GFR-binding peptide
  MOD_RES (15)..(16): Xaa is C or S
DIFLVSIPSLQTPAXXPKPVT

SEQ ID NO: 7879 - protein, 20 aa, Artificial Sequence
  Cyclic GFR-binding peptide
  MOD_RES (14)..(15): Xaa is C or S
IFLISIPSLAQPVXXPAASA

SEQ ID NO: 7880 - protein, 25 aa, Artificial Sequence
  Cyclic GFR-binding peptide
  MOD_RES (19)..(20): Xaa is C or S
PTKGIYYVIPLPELDQSVXXPSASA

SEQ ID NO: 7881 - protein, 21 aa, Artificial Sequence
  Cyclic GFR-binding peptide
  MOD_RES (15)..(16): Xaa is C or S
VIFLISIPSLAQPVXXPAASA

SEQ ID NO: 7882 - protein, 23 aa, Artificial Sequence
  Cyclic GFR-binding peptide
  MOD_RES (17)..(18): Xaa is C or S
ASDFYLISIANLRTPVXXTPPTS

SEQ ID NO: 7883 - protein, 22 aa, Artificial Sequence
  Cyclic GFR-binding peptide
  MOD_RES (16)..(17): Xaa is C or S
EDYYLMTLPELETPVXXAKPIS

SEQ ID NO: 7884 - protein, 13 aa, Artificial Sequence
  Cyclic GFR-binding peptide
YYLVTLPELQTPA

SEQ ID NO: 7885 - protein, 18 aa, Artificial Sequence
  Cyclic GFR-binding peptide
VVKDYEDIFLMSIPSLET

SEQ ID NO: 7886 - protein, 21 aa, Artificial Sequence
  Cyclic GFR-binding peptide
  MOD_RES (15)..(16): Xaa is C or S
DYYVMPLPELETPVXXAKPIK

SEQ ID NO: 7887 - protein, 18 aa, Artificial Sequence
  Cyclic GFR-binding peptide
  MOD_RES (14)..(15): Xaa is C or S
YYLITLPELRTPVXXTPP

SEQ ID NO: 7888 - protein, 18 aa, Artificial Sequence
  Cyclic GFR-binding peptide
  MOD_RES (14)..(15): Xaa is C or S
YYVVPLPELKTPAXXPKP

SEQ ID NO: 7889 - protein, 13 aa, Artificial Sequence
  Cyclic GFR-binding peptide
YYLITLPELRTPV

SEQ ID NO: 7890 - protein, 20 aa, Artificial Sequence
  Cyclic GFR-binding peptide
  MOD_RES (14)..(15): Xaa is C or S
IFLISIPSLDQPVXXPSASA

SEQ ID NO: 7891 - protein, 17 aa, Artificial Sequence
  Cyclic GFR-binding peptide
  MOD_RES (14)..(15): Xaa is C or S
IFLVSIPSLKTPAXXPK

SEQ ID NO: 7892 - protein, 21 aa, Artificial Sequence
  Cyclic GFR-binding peptide
  MOD_RES (15)..(16): Xaa is C or S
DIFLMSIPSLETPVXXAKPIS

SEQ ID NO: 7893 - protein, 19 aa, Artificial Sequence
  Cyclic GFR-binding peptide
VVKDYEDYYVMPLPELETP

SEQ ID NO: 7894 - protein, 26 aa, Artificial Sequence
  Cyclic GFR-binding peptide
  MOD_RES (20)..(21): Xaa is C or S
KPTRGVYYVIPLPELDQPVXXPSASA

SEQ ID NO: 7895 - protein, 27 aa, Artificial Sequence
  Cyclic GFR-binding peptide
  MOD_RES (21)..(22): Xaa is C or S
IKPTKGIYYVIPLPELDQSVXXPSASA

SEQ ID NO: 7896 - protein, 25 aa, Artificial Sequence
  Cyclic GFR-binding peptide
  MOD_RES (19)..(20): Xaa is C or S
KENEDIFLMSIPSLETPVXXAKPIK

SEQ ID NO: 7897 - protein, 16 aa, Artificial Sequence
  Cyclic GFR-binding peptide
  MOD_RES (14)..(15): Xaa is C or S
YYLITLPELAQPVXXP

SEQ ID NO: 7898 - protein, 21 aa, Artificial Sequence
  Cyclic GFR-binding peptide
  MOD_RES (15)..(16): Xaa is C or S
DYYVIPLPELRTPVXXTPPTS

SEQ ID NO: 7899 - protein, 21 aa, Artificial Sequence
  Cyclic GFR-binding peptide
  MOD_RES (15)..(16): Xaa is C or S
IYYVIPLPELDQSVXXPSASA

SEQ ID NO: 7900 - protein, 17 aa, Artificial Sequence
  Cyclic GFR-binding peptide
IVNSSDDIFLVSIPSLQ

SEQ ID NO: 7901 - protein, 17 aa, Artificial Sequence
  Cyclic GFR-binding peptide
IVNSSDDIFLVSIPSLK

SEQ ID NO: 7902 - protein, 22 aa, Artificial Sequence
  Cyclic GFR-binding peptide
  MOD_RES (16)..(17): Xaa is C or S
EDIFLMSIPSLETPVXXAKPIS

SEQ ID NO: 7903 - protein, 27 aa, Artificial Sequence
  Cyclic GFR-binding peptide
  MOD_RES (21)..(22): Xaa is C or S
VVKDYEDIFLMSIPSLETPVXXAKPIS

SEQ ID NO: 7904 - protein, 21 aa, Artificial Sequence
  Cyclic GFR-binding peptide
  MOD_RES (15)..(16): Xaa is C or S
DLYLISIASLRTPVXXTPPTS

SEQ ID NO: 7905 - protein, 17 aa, Artificial Sequence
  Cyclic GFR-binding peptide
  MOD_RES (14)..(15): Xaa is C or S
IFLMSIPSLETPVXXAK

SEQ ID NO: 7906 - protein, 16 aa, Artificial Sequence
  Cyclic GFR-binding peptide
VVKENEDYYLMTLPEL

SEQ ID NO: 7907 - protein, 17 aa, Artificial Sequence
  Cyclic GFR-binding peptide
  MOD_RES (14)..(15): Xaa is C or S
YYVVPLPELKTPAXXPK

SEQ ID NO: 7908 - protein, 24 aa, Artificial Sequence
  Cyclic GFR-binding peptide
  MOD_RES (18)..(18): Xaa is C or S
SSDDYYVVPLPELKTPAXTPKTVH

SEQ ID NO: 7909 - protein, 22 aa, Artificial Sequence
  Cyclic GFR-binding peptide
  MOD_RES (16)..(17): Xaa is C or S
DDYYVVPLPELKTPAXXPKPVY

SEQ ID NO: 7910 - protein, 19 aa, Artificial Sequence
  Cyclic GFR-binding peptide
  MOD_RES (14)..(15): Xaa is C or S
YYLITLPELRTPVXXTPPT

SEQ ID NO: 7911 - protein, 23 aa, Artificial Sequence
  Cyclic GFR-binding peptide
  MOD_RES (17)..(18): Xaa is C or S
RGVIFLISIPSLAQPVXXPAASA

SEQ ID NO: 7912 - protein, 25 aa, Artificial Sequence
  Cyclic GFR-binding peptide
  MOD_RES (19)..(20): Xaa is C or S
PTRGVYYVIPLPELDQPVXXPSASA

SEQ ID NO: 7913 - protein, 18 aa, Artificial Sequence
  Cyclic GFR-binding peptide
  MOD_RES (14)..(15): Xaa is C or S
IFLMSIPSLETPVXXAKP

SEQ ID NO: 7914 - protein, 22 aa, Artificial Sequence
  Cyclic GFR-binding peptide
  MOD_RES (16)..(17): Xaa is C or S
GVIFLISIPSLAQPVXXPAASA

SEQ ID NO: 7915 - protein, 18 aa, Artificial Sequence
  Cyclic GFR-binding peptide
  MOD_RES (14)..(15): Xaa is C or S
FYLISIANLRTPVXXTPP

SEQ ID NO: 7916 - protein, 27 aa, Artificial Sequence
  Cyclic GFR-binding peptide
  MOD_RES (21)..(22): Xaa is C or S
IVNSSDDYYVVPLPELKTPAXXPKPVY

SEQ ID NO: 7917 - protein, 22 aa, Artificial Sequence
  Cyclic GFR-binding peptide
  MOD_RES (16)..(16): Xaa is C or S
DDYYLVTLPELKTPAXTPKTVH

SEQ ID NO: 7918 - protein, 17 aa, Artificial Sequence
  Cyclic GFR-binding peptide
  MOD_RES (14)..(15): Xaa is C or S
YYLVTLPELKTPAXXPK

SEQ ID NO: 7919 - protein, 23 aa, Artificial Sequence
  Cyclic GFR-binding peptide
  MOD_RES (17)..(18): Xaa is C or S
NEDYYVMPLPELETPVXXAKPIK

SEQ ID NO: 7920 - protein, 24 aa, Artificial Sequence
  Cyclic GFR-binding peptide
  MOD_RES (18)..(19): Xaa is C or S
SSDDYYVVPLPELKTPAXXPKPVY

SEQ ID NO: 7921 - protein, 22 aa, Artificial Sequence
  Cyclic GFR-binding peptide
  MOD_RES (16)..(17): Xaa is C or S
DDYYVVPLPELQTPAXXPKPVT

SEQ ID NO: 7922 - protein, 20 aa, Artificial Sequence
  Cyclic GFR-binding peptide
  MOD_RES (14)..(15): Xaa is C or S
YYLITLPELAQPVXXPAASA

SEQ ID NO: 7923 - protein, 14 aa, Artificial Sequence
  Cyclic GFR-binding peptide
  MOD_RES (14)..(14): Xaa is C or S
YYVIPLPELDQPVX

SEQ ID NO: 7924 - protein, 17 aa, Artificial Sequence
  Cyclic GFR-binding peptide
VVNNASDLYLISIASLR

SEQ ID NO: 7925 - protein, 18 aa, Artificial Sequence
  Cyclic GFR-binding peptide
  MOD_RES (14)..(15): Xaa is C or S
YYLVTLPELQTPAXXPKP

SEQ ID NO: 7926 - protein, 15 aa, Artificial Sequence
  Cyclic GFR-binding peptide
  MOD_RES (14)..(15): Xaa is C or S
IFLMSIPSLETPVXX

SEQ ID NO: 7927 - protein, 22 aa, Artificial Sequence
  Cyclic GFR-binding peptide
  MOD_RES (16)..(17): Xaa is C or S
SDLYLISIASLRTPVXXTPPTS

SEQ ID NO: 7928 - protein, 19 aa, Artificial Sequence
  Cyclic GFR-binding peptide
VVKENEDYYVMPLPELETP

SEQ ID NO: 7929 - protein, 15 aa, Artificial Sequence
  Cyclic GFR-binding peptide
VKPKRGVIFLISIPS

SEQ ID NO: 7930 - protein, 17 aa, Artificial Sequence
  Cyclic GFR-binding peptide
  MOD_RES (14)..(15): Xaa is C or S
LYLISIASLRTPVXXTP

SEQ ID NO: 7931 - protein, 19 aa, Artificial Sequence
  Cyclic GFR-binding peptide
  MOD_RES (14)..(15): Xaa is C or S
FYLISIANLRTPVXXTPPT

SEQ ID NO: 7932 - protein, 19 aa, Artificial Sequence
  Cyclic GFR-binding peptide
IVNSSDDYYLVTLPELKTP

SEQ ID NO: 7933 - protein, 18 aa, Artificial Sequence
  Cyclic GFR-binding peptide
  MOD_RES (14)..(15): Xaa is C or S
YYLITLPELAQPVXXPAA

SEQ ID NO: 7934 - protein, 19 aa, Artificial Sequence
  Cyclic GFR-binding peptide
IVNSSDDYYLVTLPELQTP

SEQ ID NO: 7935 - protein, 20 aa, Artificial Sequence
  Cyclic GFR-binding peptide
  MOD_RES (14)..(15): Xaa is C or S
FYLISIANLRTPVXXTPPTS

SEQ ID NO: 7936 - protein, 13 aa, Artificial Sequence
  Cyclic GFR-binding peptide
FYLISIANLRTPV

SEQ ID NO: 7937 - protein, 27 aa, Artificial Sequence
  Cyclic GFR-binding peptide
  MOD_RES (21)..(22): Xaa is C or S
VVKENEDYYVMPLPELETPVXXAKPIK

SEQ ID NO: 7938 - protein, 17 aa, Artificial Sequence
  Cyclic GFR-binding peptide
  MOD_RES (14)..(15): Xaa is C or S
IFLISIPSLDQPVXXPS

SEQ ID NO: 7939 - protein, 18 aa, Artificial Sequence
  Cyclic GFR-binding peptide
IKPTKGIYYVIPLPELDQ

SEQ ID NO: 7940 - protein, 16 aa, Artificial Sequence
  Cyclic GFR-binding peptide
  MOD_RES (14)..(15): Xaa is C or S
IFLISIPSLAQPVXXP

SEQ ID NO: 7941 - protein, 25 aa, Artificial Sequence
  Cyclic GFR-binding peptide
  MOD_RES (19)..(20): Xaa is C or S
KDYEDIFLMSIPSLETPVXXAKPIS

SEQ ID NO: 7942 - protein, 25 aa, Artificial Sequence
  Cyclic GFR-binding peptide
  MOD_RES (19)..(20): Xaa is C or S
NSSDDYYLVTLPELKTPAXXPKPVY

SEQ ID NO: 7943 - protein, 26 aa, Artificial Sequence
  Cyclic GFR-binding peptide
  MOD_RES (20)..(21): Xaa is C or S
VKDYEDIFLMSIPSLETPVXXAKPIS

SEQ ID NO: 7944 - protein, 24 aa, Artificial Sequence
  Cyclic GFR-binding peptide
  MOD_RES (18)..(19): Xaa is C or S
TKGIIFLISIPSLDQSVXXPSASA

SEQ ID NO: 7945 - protein, 19 aa, Artificial Sequence
  Cyclic GFR-binding peptide
VKPTRGVYYVIPLPELDQP

SEQ ID NO: 7946 - protein, 22 aa, Artificial Sequence
  Cyclic GFR-binding peptide
  MOD_RES (16)..(17): Xaa is C or S
EDIFLMSIPSLETPVXXAKPIK

SEQ ID NO: 7947 - protein, 18 aa, Artificial Sequence
  Cyclic GFR-binding peptide
  MOD_RES (14)..(14): Xaa is C or S
YYVVPLPELKTPAXTPKT

SEQ ID NO: 7948 - protein, 18 aa, Artificial Sequence
  Cyclic GFR-binding peptide
VVNNASDYYVIPLPELRT

SEQ ID NO: 7949 - protein, 16 aa, Artificial Sequence
  Cyclic GFR-binding peptide
VVKDYEDYYVMPLPEL

SEQ ID NO: 7950 - protein, 15 aa, Artificial Sequence
  Cyclic GFR-binding peptide
  MOD_RES (14)..(15): Xaa is C or S
YYLITLPELAQPVXX

SEQ ID NO: 7951 - protein, 13 aa, Artificial Sequence
  Cyclic GFR-binding peptide
YYLVTLPELKTPA

SEQ ID NO: 7952 - protein, 14 aa, Artificial Sequence
  Cyclic GFR-binding peptide
  MOD_RES (14)..(14): Xaa is C or S
YYLITLPELAQPVX

SEQ ID NO: 7953 - protein, 17 aa, Artificial Sequence
  Cyclic GFR-binding peptide
  MOD_RES (14)..(15): Xaa is C or S
IFLISIPSLDQSVXXPS

SEQ ID NO: 7954 - protein, 25 aa, Artificial Sequence
  Cyclic GFR-binding peptide
  MOD_RES (19)..(20): Xaa is C or S
NSSDDYYVVPLPELQTPAXXPKPVT

SEQ ID NO: 7955 - protein, 26 aa, Artificial Sequence
  Cyclic GFR-binding peptide
  MOD_RES (20)..(21): Xaa is C or S
VNNASDYYLITLPELRTPVXXTPPTS

SEQ ID NO: 7956 - protein, 21 aa, Artificial Sequence
  Cyclic GFR-binding peptide
  MOD_RES (15)..(16): Xaa is C or S
DYYLMTLPELETPVXXAKPIS

SEQ ID NO: 7957 - protein, 27 aa, Artificial Sequence
  Cyclic GFR-binding peptide
  MOD_RES (21)..(22): Xaa is C or S
VVNNASDYYLITLPELRTPVXXTPPTS

SEQ ID NO: 7958 - protein, 19 aa, Artificial Sequence
  Cyclic GFR-binding peptide
VVNNASDYYLITLPELRTP

SEQ ID NO: 7959 - protein, 18 aa, Artificial Sequence
  Cyclic GFR-binding peptide
IVNSSDDYYVVPLPELKT

SEQ ID NO: 7960 - protein, 25 aa, Artificial Sequence
  Cyclic GFR-binding peptide
  MOD_RES (19)..(20): Xaa is C or S
NSSDDIFLVSIPSLQTPAXXPKPVT

SEQ ID NO: 7961 - protein, 15 aa, Artificial Sequence
  Cyclic GFR-binding peptide
IKPTKGIIFLISIPS

SEQ ID NO: 7962 - protein, 23 aa, Artificial Sequence
  Cyclic GFR-binding peptide
  MOD_RES (17)..(18): Xaa is C or S
ASDLYLISIASLRTPVXXTPPTS

SEQ ID NO: 7963 - protein, 18 aa, Artificial Sequence
  Cyclic GFR-binding peptide
  MOD_RES (14)..(15): Xaa is C or S
YYVVPLPELQTPAXXPKP

SEQ ID NO: 7964 - protein, 16 aa, Artificial Sequence
  Cyclic GFR-binding peptide
IVNSSDDYYLVTLPEL

SEQ ID NO: 7965 - protein, 17 aa, Artificial Sequence
  Cyclic GFR-binding peptide
  MOD_RES (14)..(15): Xaa is C or S
FYLISIANLRTPVXXTP

SEQ ID NO: 7966 - protein, 18 aa, Artificial Sequence
  Cyclic GFR-binding peptide
IVNSSDDYYVVPLPELQT

SEQ ID NO: 7967 - protein, 24 aa, Artificial Sequence
  Cyclic GFR-binding peptide
  MOD_RES (18)..(19): Xaa is C or S
SSDDYYLVTLPELQTPAXXPKPVT

SEQ ID NO: 7968 - protein, 13 aa, Artificial Sequence
  Cyclic GFR-binding peptide
YYVVPLPELQTPA

SEQ ID NO: 7969 - protein, 16 aa, Artificial Sequence
  Cyclic GFR-binding peptide
  MOD_RES (14)..(15): Xaa is C or S
IFLISIPSLDQSVXXP

SEQ ID NO: 7970 - protein, 21 aa, Artificial Sequence
  Cyclic GFR-binding peptide
  MOD_RES (15)..(16): Xaa is C or S
DYYLVTLPELQTPAXXPKPVT

SEQ ID NO: 7971 - protein, 16 aa, Artificial Sequence
  Cyclic GFR-binding peptide
  MOD_RES (14)..(15): Xaa is C or S
YYVMPLPELETPVXXA

SEQ ID NO: 7972 - protein, 18 aa, Artificial Sequence
  Cyclic GFR-binding peptide
  MOD_RES (14)..(15): Xaa is C or S
LYLISIASLRTPVXXTPP

SEQ ID NO: 7973 - protein, 18 aa, Artificial Sequence
  Cyclic GFR-binding peptide
VKPTRGVIFLISIPSLDQ

SEQ ID NO: 7974 - protein, 14 aa, Artificial Sequence
  Cyclic GFR-binding peptide
  MOD_RES (14)..(14): Xaa is C or S
IFLMSIPSLETPVX

SEQ ID NO: 7975 - protein, 14 aa, Artificial Sequence
  Cyclic GFR-binding peptide
  MOD_RES (14)..(14): Xaa is C or S
IFLISIPSLAQPVX

SEQ ID NO: 7976 - protein, 13 aa, Artificial Sequence
  Cyclic GFR-binding peptide
YYVIPLPELDQPV

SEQ ID NO: 7977 - protein, 22 aa, Artificial Sequence
  Cyclic GFR-binding peptide
  MOD_RES (16)..(17): Xaa is C or S
DDYYLVTLPELQTPAXXPKPVT

SEQ ID NO: 7978 - protein, 17 aa, Artificial Sequence
  Cyclic GFR-binding peptide
VVNNASDYYVIPLPELR

SEQ ID NO: 7979 - protein, 17 aa, Artificial Sequence
  Cyclic GFR-binding peptide
  MOD_RES (14)..(15): Xaa is C or S
YYLVTLPELQTPAXXPK

SEQ ID NO: 7980 - protein, 18 aa, Artificial Sequence
  Cyclic GFR-binding peptide
  MOD_RES (14)..(14): Xaa is C or S
YYLVTLPELKTPAXTPKT

SEQ ID NO: 7981 - protein, 16 aa, Artificial Sequence
  Cyclic GFR-binding peptide
  MOD_RES (14)..(15): Xaa is C or S
YYVVPLPELKTPAXXP

SEQ ID NO: 7982 - protein, 15 aa, Artificial Sequence
  Cyclic GFR-binding peptide
VVKDYEDIFLMSIPS

SEQ ID NO: 7983 - protein, 13 aa, Artificial Sequence
  Cyclic GFR-binding peptide
LYLISIASLRTPV

SEQ ID NO: 7984 - protein, 16 aa, Artificial Sequence
  Cyclic GFR-binding peptide
  MOD_RES (14)..(14): Xaa is C or S
YYLVTLPELKTPAXTP

SEQ ID NO: 7985 - protein, 19 aa, Artificial Sequence
  Cyclic GFR-binding peptide
  MOD_RES (14)..(15): Xaa is C or S
IFLISIPSLDQPVXXPSAS

SEQ ID NO: 7986 - protein, 20 aa, Artificial Sequence
  Cyclic GFR-binding peptide
  MOD_RES (14)..(15): Xaa is C or S
IFLVSIPSLKTPAXXPKPVY

SEQ ID NO: 7987 - protein, 16 aa, Artificial Sequence
  Cyclic GFR-binding peptide
  MOD_RES (14)..(15): Xaa is C or S
IFLMSIPSLETPVXXA

SEQ ID NO: 7988 - protein, 13 aa, Artificial Sequence
  Cyclic GFR-binding peptide
YYLMTLPELETPV

SEQ ID NO: 7989 - protein, 15 aa, Artificial Sequence
  Cyclic GFR-binding peptide
  MOD_RES (14)..(15): Xaa is C or S
YYLMTLPELETPVXX

SEQ ID NO: 7990 - protein, 24 aa, Artificial Sequence
  Cyclic GFR-binding peptide
  MOD_RES (18)..(19): Xaa is C or S
KRGVYYLITLPELAQPVXXPAASA

SEQ ID NO: 7991 - protein, 15 aa, Artificial Sequence
  Cyclic GFR-binding peptide
  MOD_RES (14)..(15): Xaa is C or S
IFLISIPSLDQSVXX

SEQ ID NO: 7992 - protein, 18 aa, Artificial Sequence
  Cyclic GFR-binding peptide
IVNSSDDIFLVSIPSLKT

SEQ ID NO: 7993 - protein, 17 aa, Artificial Sequence
  Cyclic GFR-binding peptide
  MOD_RES (14)..(14): Xaa is C or S
IFLVSIPSLKTPAXTPK

SEQ ID NO: 7994 - protein, 17 aa, Artificial Sequence
  Cyclic GFR-binding peptide
  MOD_RES (14)..(15): Xaa is C or S
YYVVPLPELQTPAXXPK

SEQ ID NO: 7995 - protein, 14 aa, Artificial Sequence
  Cyclic GFR-binding peptide
  MOD_RES (14)..(14): Xaa is C or S
YYVVPLPELQTPAX

SEQ ID NO: 7996 - protein, 18 aa, Artificial Sequence
  Cyclic GFR-binding peptide
VVKENEDYYLMTLPELET

SEQ ID NO: 7997 - protein, 17 aa, Artificial Sequence
  Cyclic GFR-binding peptide
  MOD_RES (14)..(14): Xaa is C or S
YYVVPLPELKTPAXTPK

SEQ ID NO: 7998 - protein, 18 aa, Artificial Sequence
  Cyclic GFR-binding peptide
IVNSSDDIFLVSIPSLQT

SEQ ID NO: 7999 - protein, 19 aa, Artificial Sequence
  Cyclic GFR-binding peptide
  MOD_RES (14)..(15): Xaa is C or S
IFLMSIPSLETPVXXAKPI

SEQ ID NO: 8000 - protein, 26 aa, Artificial Sequence
  Cyclic GFR-binding peptide
  MOD_RES (20)..(21): Xaa is C or S
VNSSDDYYVVPLPELQTPAXXPKPVT

SEQ ID NO: 8001 - protein, 19 aa, Artificial Sequence
  Cyclic GFR-binding peptide
  MOD_RES (14)..(15): Xaa is C or S
LYLISIASLRTPVXXTPPT

SEQ ID NO: 8002 - protein, 16 aa, Artificial Sequence
  Cyclic GFR-binding peptide
  MOD_RES (14)..(14): Xaa is C or S
YYVVPLPELKTPAXTP

SEQ ID NO: 8003 - protein, 17 aa, Artificial Sequence
  Cyclic GFR-binding peptide
  MOD_RES (14)..(15): Xaa is C or S
YYVIPLPELDQSVXXPS

SEQ ID NO: 8004 - protein, 16 aa, Artificial Sequence
  Cyclic GFR-binding peptide
  MOD_RES (14)..(15): Xaa is C or S
YYLVTLPELKTPAXXP

SEQ ID NO: 8005 - protein, 25 aa, Artificial Sequence
  Cyclic GFR-binding peptide
  MOD_RES (19)..(19): Xaa is C or S
NSSDDYYLVTLPELKTPAXTPKTVH

SEQ ID NO: 8006 - protein, 23 aa, Artificial Sequence
  Cyclic GFR-binding peptide
  MOD_RES (17)..(18): Xaa is C or S
SDDYYVVPLPELQTPAXXPKPVT

SEQ ID NO: 8007 - protein, 15 aa, Artificial Sequence
  Cyclic GFR-binding peptide
VVKENEDYYVMPLPE

SEQ ID NO: 8008 - protein, 19 aa, Artificial Sequence
  Cyclic GFR-binding peptide
  MOD_RES (14)..(15): Xaa is C or S
IFLISIPSLAQPVXXPAAS

SEQ ID NO: 8009 - protein, 13 aa, Artificial Sequence
  Cyclic GFR-binding peptide
IFLISIPSLDQPV

SEQ ID NO: 8010 - protein, 13 aa, Artificial Sequence
  Cyclic GFR-binding peptide
IFLMSIPSLETPV

SEQ ID NO: 8011 - protein, 17 aa, Artificial Sequence
  Cyclic GFR-binding peptide
VVKDYEDIFLMSIPSLE

SEQ ID NO: 8012 - protein, 16 aa, Artificial Sequence
  Cyclic GFR-binding peptide
  MOD_RES (14)..(15): Xaa is C or S
YYLITLPELRTPVXXT

SEQ ID NO: 8013 - protein, 26 aa, Artificial Sequence
  Cyclic GFR-binding peptide
  MOD_RES (20)..(21): Xaa is C or S
KPKRGVYYLITLPELAQPVXXPAASA

SEQ ID NO: 8014 - protein, 21 aa, Artificial Sequence
  Cyclic GFR-binding peptide
  MOD_RES (15)..(16): Xaa is C or S
IIFLISIPSLDQSVXXPSASA

SEQ ID NO: 8015 - protein, 16 aa, Artificial Sequence
  Cyclic GFR-binding peptide
  MOD_RES (14)..(14): Xaa is C or S
IFLVSIPSLKTPAXTP

SEQ ID NO: 8016 - protein, 17 aa, Artificial Sequence
  Cyclic GFR-binding peptide
  MOD_RES (14)..(14): Xaa is C or S
YYLVTLPELKTPAXTPK

SEQ ID NO: 8017 - protein, 14 aa, Artificial Sequence
  Cyclic GFR-binding peptide
  MOD_RES (14)..(14): Xaa is C or S
IFLISIPSLDQSVX

SEQ ID NO: 8018 - protein, 17 aa, Artificial Sequence
  Cyclic GFR-binding peptide
VVKENEDYYVMPLPELE

SEQ ID NO: 8019 - protein, 18 aa, Artificial Sequence
  Cyclic GFR-binding peptide
VKPKRGVIFLISIPSLAQ

SEQ ID NO: 8020 - protein, 16 aa, Artificial Sequence
  Cyclic GFR-binding peptide
  MOD_RES (14)..(15): Xaa is C or S
YYLMTLPELETPVXXA

SEQ ID NO: 8021 - protein, 16 aa, Artificial Sequence
  Cyclic GFR-binding peptide
VKPTRGVYYVIPLPEL

SEQ ID NO: 8022 - protein, 25 aa, Artificial Sequence
  Cyclic GFR-binding peptide
  MOD_RES (19)..(20): Xaa is C or S
KDYEDYYVMPLPELETPVXXAKPIS

SEQ ID NO: 8023 - protein, 14 aa, Artificial Sequence
  Cyclic GFR-binding peptide
  MOD_RES (14)..(14): Xaa is C or S
YYLVTLPELQTPAX

SEQ ID NO: 8024 - protein, 15 aa, Artificial Sequence
  Cyclic GFR-binding peptide
  MOD_RES (14)..(15): Xaa is C or S
YYVIPLPELDQPVXX

SEQ ID NO: 8025 - protein, 13 aa, Artificial Sequence
  Cyclic GFR-binding peptide
IFLISIPSLDQSV

SEQ ID NO: 8026 - protein, 19 aa, Artificial Sequence
  Cyclic GFR-binding peptide
  MOD_RES (14)..(15): Xaa is C or S
YYLMTLPELETPVXXAKPI

SEQ ID NO: 8027 - protein, 15 aa, Artificial Sequence
  Cyclic GFR-binding peptide
  MOD_RES (14)..(15): Xaa is C or S
IFLISIPSLAQPVXX

SEQ ID NO: 8028 - protein, 26 aa, Artificial Sequence
  Cyclic GFR-binding peptide
  MOD_RES (20)..(21): Xaa is C or S
KPTKGIIFLISIPSLDQSVXXPSASA

SEQ ID NO: 8029 - protein, 19 aa, Artificial Sequence
  Cyclic GFR-binding peptide
VVKENEDYYLMTLPELETP

SEQ ID NO: 8030 - protein, 27 aa, Artificial Sequence
  Cyclic GFR-binding peptide
  MOD_RES (21)..(22): Xaa is C or S
IKPTKGIIFLISIPSLDQSVXXPSASA

SEQ ID NO: 8031 - protein, 23 aa, Artificial Sequence
  Cyclic GFR-binding peptide
  MOD_RES (17)..(18): Xaa is C or S
NEDIFLMSIPSLETPVXXAKPIK

SEQ ID NO: 8032 - protein, 16 aa, Artificial Sequence
  Cyclic GFR-binding peptide
  MOD_RES (14)..(15): Xaa is C or S
IFLVSIPSLKTPAXXP

SEQ ID NO: 8033 - protein, 17 aa, Artificial Sequence
  Cyclic GFR-binding peptide
  MOD_RES (14)..(15): Xaa is C or S
YYLITLPELAQPVXXPA

SEQ ID NO: 8034 - protein, 19 aa, Artificial Sequence
  Cyclic GFR-binding peptide
  MOD_RES (14)..(15): Xaa is C or S
YYVIPLPELDQPVXXPSAS

SEQ ID NO: 8035 - protein, 27 aa, Artificial Sequence
  Cyclic GFR-binding peptide
  MOD_RES (21)..(22): Xaa is C or S
IVNSSDDYYLVTLPELKTPAXXPKPVY

SEQ ID NO: 8036 - protein, 19 aa, Artificial Sequence
  Cyclic GFR-binding peptide
VVKDYEDIFLMSIPSLETP

SEQ ID NO: 8037 - protein, 26 aa, Artificial Sequence
  Cyclic GFR-binding peptide
  MOD_RES (20)..(21): Xaa is C or S
VKENEDYYLMTLPELETPVXXAKPIK

SEQ ID NO: 8038 - protein, 14 aa, Artificial Sequence
  Cyclic GFR-binding peptide
  MOD_RES (14)..(14): Xaa is C or S
IFLVSIPSLQTPAX

SEQ ID NO: 8039 - protein, 19 aa, Artificial Sequence
  Cyclic GFR-binding peptide
  MOD_RES (14)..(15): Xaa is C or S
IFLVSIPSLQTPAXXPKPV

SEQ ID NO: 8040 - protein, 17 aa, Artificial Sequence
  Cyclic GFR-binding peptide
IKPTKGIIFLISIPSLD

SEQ ID NO: 8041 - protein, 20 aa, Artificial Sequence
  Cyclic GFR-binding peptide
  MOD_RES (14)..(15): Xaa is C or S
IFLVSIPSLQTPAXXPKPVT

SEQ ID NO: 8042 - protein, 14 aa, Artificial Sequence
  Cyclic GFR-binding peptide
  MOD_RES (14)..(14): Xaa is C or S
YYVIPLPELDQSVX

SEQ ID NO: 8043 - protein, 24 aa, Artificial Sequence
  Cyclic GFR-binding peptide
  MOD_RES (18)..(18): Xaa is C or S
SSDDIFLVSIPSLKTPAXTPKTVH

SEQ ID NO: 8044 - protein, 13 aa, Artificial Sequence
  Cyclic GFR-binding peptide
YYVMPLPELETPV

SEQ ID NO: 8045 - protein, 15 aa, Artificial Sequence
  Cyclic GFR-binding peptide
  MOD_RES (14)..(15): Xaa is C or S
YYVMPLPELETPVXX

SEQ ID NO: 8046 - protein, 27 aa, Artificial Sequence
  Cyclic GFR-binding peptide
  MOD_RES (21)..(21): Xaa is C or S
IVNSSDDIFLVSIPSLKTPAXTPKTVH

SEQ ID NO: 8047 - protein, 23 aa, Artificial Sequence
  Cyclic GFR-binding peptide
  MOD_RES (17)..(17): Xaa is C or S
SDDYYVVPLPELKTPAXTPKTVH

SEQ ID NO: 8048 - protein, 13 aa, Artificial Sequence
  Cyclic GFR-binding peptide
IFLVSIPSLQTPA

SEQ ID NO: 8049 - protein, 18 aa, Artificial Sequence
  Cyclic GFR-binding peptide
IKPTKGIIFLISIPSLDQ

SEQ ID NO: 8050 - protein, 25 aa, Artificial Sequence
  Cyclic GFR-binding peptide
  MOD_RES (19)..(20): Xaa is C or S
PKRGVIFLISIPSLAQPVXXPAASA

SEQ ID NO: 8051 - protein, 21 aa, Artificial Sequence
  Cyclic GFR-binding peptide
  MOD_RES (15)..(16): Xaa is C or S
DFYLISIANLRTPVXXTPPTS

SEQ ID NO: 8052 - protein, 16 aa, Artificial Sequence
  Cyclic GFR-binding peptide
VVKENEDYYVMPLPEL

SEQ ID NO: 8053 - protein, 16 aa, Artificial Sequence
  Cyclic GFR-binding peptide
VVKDYEDIFLMSIPSL

SEQ ID NO: 8054 - protein, 13 aa, Artificial Sequence
  Cyclic GFR-binding peptide
YYVIPLPELDQSV

SEQ ID NO: 8055 - protein, 26 aa, Artificial Sequence
  Cyclic GFR-binding peptide
  MOD_RES (20)..(21): Xaa is C or S
KPTRGVIFLISIPSLDQPVXXPSASA

SEQ ID NO: 8056 - protein, 19 aa, Artificial Sequence
  Cyclic GFR-binding peptide
  MOD_RES (14)..(15): Xaa is C or S
YYLVTLPELQTPAXXPKPV

SEQ ID NO: 8057 - protein, 14 aa, Artificial Sequence
  Cyclic GFR-binding peptide
  MOD_RES (14)..(14): Xaa is C or S
YYLMTLPELETPVX

SEQ ID NO: 8058 - protein, 27 aa, Artificial Sequence
  Cyclic GFR-binding peptide
  MOD_RES (21)..(22): Xaa is C or S
VKPTRGVYYVIPLPELDQPVXXPSASA

SEQ ID NO: 8059 - protein, 20 aa, Artificial Sequence
  Cyclic GFR-binding peptide
  MOD_RES (14)..(15): Xaa is C or S
YYLVTLPELKTPAXXPKPVY

SEQ ID NO: 8060 - protein, 14 aa, Artificial Sequence
  Cyclic GFR-binding peptide
  MOD_RES (14)..(14): Xaa is C or S
YYVMPLPELETPVX

SEQ ID NO: 8061 - protein, 25 aa, Artificial Sequence
  Cyclic GFR-binding peptide
  MOD_RES (19)..(20): Xaa is C or S
KDYEDYYLMTLPELETPVXXAKPIS

SEQ ID NO: 8062 - protein, 17 aa, Artificial Sequence
  Cyclic GFR-binding peptide
  MOD_RES (14)..(15): Xaa is C or S
YYVIPLPELDQPVXXPS

SEQ ID NO: 8063 - protein, 13 aa, Artificial Sequence
  Cyclic GFR-binding peptide
IFLISIPSLAQPV

SEQ ID NO: 8064 - protein, 17 aa, Artificial Sequence
  Cyclic GFR-binding peptide
VVNNASDFYLISIANLR

SEQ ID NO: 8065 - protein, 16 aa, Artificial Sequence
  Cyclic GFR-binding peptide
  MOD_RES (14)..(15): Xaa is C or S
FYLISIANLRTPVXXT

SEQ ID NO: 8066 - protein, 17 aa, Artificial Sequence
  Cyclic GFR-binding peptide
VKPKRGVIFLISIPSLA

SEQ ID NO: 8067 - protein, 15 aa, Artificial Sequence
  Cyclic GFR-binding peptide
  MOD_RES (14)..(15): Xaa is C or S
YYVIPLPELDQSVXX

SEQ ID NO: 8068 - protein, 18 aa, Artificial Sequence
  Cyclic GFR-binding peptide
VVNNASDYYLITLPELRT

SEQ ID NO: 8069 - protein, 20 aa, Artificial Sequence
  Cyclic GFR-binding peptide
  MOD_RES (14)..(15): Xaa is C or S
YYLVTLPELQTPAXXPKPVT

SEQ ID NO: 8070 - protein, 26 aa, Artificial Sequence
  Cyclic GFR-binding peptide
  MOD_RES (20)..(20): Xaa is C or S
VNSSDDYYVVPLPELKTPAXTPKTVH

SEQ ID NO: 8071 - protein, 19 aa, Artificial Sequence
  Cyclic GFR-binding peptide
VKPTRGVIFLISIPSLDQP

SEQ ID NO: 8072 - protein, 16 aa, Artificial Sequence
  Cyclic GFR-binding peptide
VVKENEDIFLMSIPSL

SEQ ID NO: 8073 - protein, 15 aa, Artificial Sequence
  Cyclic GFR-binding peptide
  MOD_RES (14)..(15): Xaa is C or S
IFLISIPSLDQPVXX

SEQ ID NO: 8074 - protein, 19 aa, Artificial Sequence
  Cyclic GFR-binding peptide
  MOD_RES (14)..(15): Xaa is C or S
YYLITLPELAQPVXXPAAS

SEQ ID NO: 8075 - protein, 14 aa, Artificial Sequence
  Cyclic GFR-binding peptide
  MOD_RES (14)..(14): Xaa is C or S
IFLISIPSLDQPVX

SEQ ID NO: 8076 - protein, 19 aa, Artificial Sequence
  Cyclic GFR-binding peptide
VKPKRGVIFLISIPSLAQP

SEQ ID NO: 8077 - protein, 22 aa, Artificial Sequence
  Cyclic GFR-binding peptide
  MOD_RES (16)..(17): Xaa is C or S
SDFYLISIANLRTPVXXTPPTS

SEQ ID NO: 8078 - protein, 17 aa, Artificial Sequence
  Cyclic GFR-binding peptide
  MOD_RES (14)..(15): Xaa is C or S
YYLITLPELRTPVXXTP

SEQ ID NO: 8079 - protein, 16 aa, Artificial Sequence
  Cyclic GFR-binding peptide
VVNNASDYYLITLPEL

SEQ ID NO: 8080 - protein, 23 aa, Artificial Sequence
  Cyclic GFR-binding peptide
  MOD_RES (17)..(17): Xaa is C or S
SDDIFLVSIPSLKTPAXTPKTVH

SEQ ID NO: 8081 - protein, 24 aa, Artificial Sequence
  Cyclic GFR-binding peptide
  MOD_RES (18)..(19): Xaa is C or S
TKGIYYVIPLPELDQSVXXPSASA

SEQ ID NO: 8082 - protein, 21 aa, Artificial Sequence
  Cyclic GFR-binding peptide
  MOD_RES (15)..(15): Xaa is C or S
DYYLVTLPELKTPAXTPKTVH

SEQ ID NO: 8083 - protein, 25 aa, Artificial Sequence
  Cyclic GFR-binding peptide
  MOD_RES (19)..(20): Xaa is C or S
NSSDDIFLVSIPSLKTPAXXPKPVY

SEQ ID NO: 8084 - protein, 21 aa, Artificial Sequence
  Cyclic GFR-binding peptide
  MOD_RES (15)..(16): Xaa is C or S
VIFLISIPSLDQPVXXPSASA

SEQ ID NO: 8085 - protein, 18 aa, Artificial Sequence
  Cyclic GFR-binding peptide
  MOD_RES (14)..(15): Xaa is C or S
YYVIPLPELRTPVXXTPP

SEQ ID NO: 8086 - protein, 19 aa, Artificial Sequence
  Cyclic GFR-binding peptide
VVNNASDYYVIPLPELRTP

SEQ ID NO: 8087 - protein, 15 aa, Artificial Sequence
  Cyclic GFR-binding peptide
  MOD_RES (14)..(15): Xaa is C or S
IFLVSIPSLQTPAXX

SEQ ID NO: 8088 - protein, 15 aa, Artificial Sequence
  Cyclic GFR-binding peptide
VVKENEDYYLMTLPE

SEQ ID NO: 8089 - protein, 24 aa, Artificial Sequence
  Cyclic GFR-binding peptide
  MOD_RES (18)..(19): Xaa is C or S
NASDYYLITLPELRTPVXXTPPTS

SEQ ID NO: 8090 - protein, 23 aa, Artificial Sequence
  Cyclic GFR-binding peptide
  MOD_RES (17)..(18): Xaa is C or S
RGVYYLITLPELAQPVXXPAASA

SEQ ID NO: 8091 - protein, 25 aa, Artificial Sequence
  Cyclic GFR-binding peptide
  MOD_RES (19)..(20): Xaa is C or S
PTKGIIFLISIPSLDQSVXXPSASA

SEQ ID NO: 8092 - protein, 16 aa, Artificial Sequence
  Cyclic GFR-binding peptide
  MOD_RES (14)..(15): Xaa is C or S
LYLISIASLRTPVXXT

SEQ ID NO: 8093 - protein, 18 aa, Artificial Sequence
  Cyclic GFR-binding peptide
  MOD_RES (14)..(14): Xaa is C or S
IFLVSIPSLKTPAXTPKT

SEQ ID NO: 8094 - protein, 19 aa, Artificial Sequence
  Cyclic GFR-binding peptide
  MOD_RES (14)..(15): Xaa is C or S
YYVMPLPELETPVXXAKPI

SEQ ID NO: 8095 - protein, 24 aa, Artificial Sequence
  Cyclic GFR-binding peptide
  MOD_RES (18)..(19): Xaa is C or S
DYEDYYLMTLPELETPVXXAKPIS

SEQ ID NO: 8096 - protein, 16 aa, Artificial Sequence
  Cyclic GFR-binding peptide
VKPKRGVYYLITLPEL

SEQ ID NO: 8097 - protein, 17 aa, Artificial Sequence
  Cyclic GFR-binding peptide
VKPTRGVIFLISIPSLD

SEQ ID NO: 8098 - protein, 19 aa, Artificial Sequence
  Cyclic GFR-binding peptide
  MOD_RES (14)..(15): Xaa is C or S
YYVIPLPELDQSVXXPSAS

SEQ ID NO: 8099 - protein, 18 aa, Artificial Sequence
  Cyclic GFR-binding peptide
VVKDYEDYYVMPLPELET

SEQ ID NO: 8100 - protein, 27 aa, Artificial Sequence
  Cyclic GFR-binding peptide
  MOD_RES (21)..(22): Xaa is C or S
IVNSSDDYYLVTLPELQTPAXXPKPVT

SEQ ID NO: 8101 - protein, 17 aa, Artificial Sequence
  Cyclic GFR-binding peptide
  MOD_RES (14)..(15): Xaa is C or S
IFLVSIPSLQTPAXXPK

SEQ ID NO: 8102 - protein, 20 aa, Artificial Sequence
  Cyclic GFR-binding peptide
  MOD_RES (14)..(15): Xaa is C or S
YYVVPLPELKTPAXXPKPVY

SEQ ID NO: 8103 - protein, 27 aa, Artificial Sequence
  Cyclic GFR-binding peptide
  MOD_RES (21)..(22): Xaa is C or S
VVKENEDIFLMSIPSLETPVXXAKPIK

SEQ ID NO: 8104 - protein, 27 aa, Artificial Sequence
  Cyclic GFR-binding peptide
  MOD_RES (21)..(22): Xaa is C or S
VVNNASDFYLISIANLRTPVXXTPPTS

SEQ ID NO: 8105 - protein, 26 aa, Artificial Sequence
  Cyclic GFR-binding peptide
  MOD_RES (20)..(21): Xaa is C or S
KPTKGIYYVIPLPELDQSVXXPSASA

SEQ ID NO: 8106 - protein, 20 aa, Artificial Sequence
  Cyclic GFR-binding peptide
  MOD_RES (14)..(15): Xaa is C or S
YYLITLPELRTPVXXTPPTS

SEQ ID NO: 8107 - protein, 24 aa, Artificial Sequence
  Cyclic GFR-binding peptide
  MOD_RES (18)..(19): Xaa is C or S
ENEDIFLMSIPSLETPVXXAKPIK

SEQ ID NO: 8108 - protein, 25 aa, Artificial Sequence
  Cyclic GFR-binding peptide
  MOD_RES (19)..(20): Xaa is C or S
NNASDYYLITLPELRTPVXXTPPTS

SEQ ID NO: 8109 - protein, 22 aa, Artificial Sequence
  Cyclic GFR-binding peptide
  MOD_RES (16)..(17): Xaa is C or S
GIIFLISIPSLDQSVXXPSASA

SEQ ID NO: 8110 - protein, 23 aa, Artificial Sequence
  Cyclic GFR-binding peptide
  MOD_RES (17)..(18): Xaa is C or S
NEDYYLMTLPELETPVXXAKPIK

SEQ ID NO: 8111 - protein, 26 aa, Artificial Sequence
  Cyclic GFR-binding peptide
  MOD_RES (20)..(21): Xaa is C or S
VNNASDFYLISIANLRTPVXXTPPTS

SEQ ID NO: 8112 - protein, 18 aa, Artificial Sequence
  Cyclic GFR-binding peptide
  MOD_RES (14)..(15): Xaa is C or S
YYVMPLPELETPVXXAKP

SEQ ID NO: 8113 - protein, 23 aa, Artificial Sequence
  Cyclic GFR-binding peptide
  MOD_RES (17)..(18): Xaa is C or S
YEDIFLMSIPSLETPVXXAKPIS

SEQ ID NO: 8114 - protein, 21 aa, Artificial Sequence
  Cyclic GFR-binding peptide
  MOD_RES (15)..(16): Xaa is C or S
DYYLMTLPELETPVXXAKPIK

SEQ ID NO: 8115 - protein, 18 aa, Artificial Sequence
  Cyclic GFR-binding peptide
  MOD_RES (14)..(15): Xaa is C or S
YYVIPLPELDQSVXXPSA

SEQ ID NO: 8116 - protein, 17 aa, Artificial Sequence
  Cyclic GFR-binding peptide
VVKENEDYYLMTLPELE

SEQ ID NO: 8117 - protein, 23 aa, Artificial Sequence
  Cyclic GFR-binding peptide
  MOD_RES (17)..(17): Xaa is C or S
SDDYYLVTLPELKTPAXTPKTVH

SEQ ID NO: 8118 - protein, 27 aa, Artificial Sequence
  Cyclic GFR-binding peptide
  MOD_RES (21)..(22): Xaa is C or S
VVNNASDLYLISIASLRTPVXXTPPTS

SEQ ID NO: 8119 - protein, 15 aa, Artificial Sequence
  Cyclic GFR-binding peptide
IVNSSDDIFLVSIPS

SEQ ID NO: 8120 - protein, 23 aa, Artificial Sequence
  Cyclic GFR-binding peptide
  MOD_RES (17)..(18): Xaa is C or S
ASDYYLITLPELRTPVXXTPPTS

SEQ ID NO: 8121 - protein, 13 aa, Artificial Sequence
  Cyclic GFR-binding peptide
YYLITLPELAQPV

SEQ ID NO: 8122 - protein, 17 aa, Artificial Sequence
  Cyclic GFR-binding peptide
  MOD_RES (14)..(15): Xaa is C or S
YYVIPLPELRTPVXXTP

SEQ ID NO: 8123 - protein, 15 aa, Artificial Sequence
  Cyclic GFR-binding peptide
VKPTRGVYYVIPLPE

SEQ ID NO: 8124 - protein, 15 aa, Artificial Sequence
  Cyclic GFR-binding peptide
VVKDYEDYYVMPLPE

SEQ ID NO: 8125 - protein, 26 aa, Artificial Sequence
  Cyclic GFR-binding peptide
  MOD_RES (20)..(21): Xaa is C or S
VKENEDIFLMSIPSLETPVXXAKPIK

SEQ ID NO: 8126 - protein, 16 aa, Artificial Sequence
  Cyclic GFR-binding peptide
VVNNASDYYVIPLPEL

SEQ ID NO: 8127 - protein, 15 aa, Artificial Sequence
  Cyclic GFR-binding peptide
IVNSSDDYYLVTLPE

SEQ ID NO: 8128 - protein, 19 aa, Artificial Sequence
  Cyclic GFR-binding peptide
VVNNASDLYLISIASLRTP

SEQ ID NO: 8129 - protein, 24 aa, Artificial Sequence
  Cyclic GFR-binding peptide
  MOD_RES (18)..(19): Xaa is C or S
DYEDYYVMPLPELETPVXXAKPIS

SEQ ID NO: 8130 - protein, 18 aa, Artificial Sequence
  Cyclic GFR-binding peptide
  MOD_RES (14)..(15): Xaa is C or S
YYLMTLPELETPVXXAKP

SEQ ID NO: 8131 - protein, 17 aa, Artificial Sequence
  Cyclic GFR-binding peptide
  MOD_RES (14)..(15): Xaa is C or S
IFLISIPSLAQPVXXPA

SEQ ID NO: 8132 - protein, 20 aa, Artificial Sequence
  Cyclic GFR-binding peptide
  MOD_RES (14)..(15): Xaa is C or S
YYVIPLPELDQPVXXPSASA

SEQ ID NO: 8133 - protein, 14 aa, Artificial Sequence
  Cyclic GFR-binding peptide
  MOD_RES (14)..(14): Xaa is C or S
FYLISIANLRTPVX

SEQ ID NO: 8134 - protein, 26 aa, Artificial Sequence
  Cyclic GFR-binding peptide
  MOD_RES (20)..(21): Xaa is C or S
VKDYEDYYVMPLPELETPVXXAKPIS

SEQ ID NO: 8135 - protein, 24 aa, Artificial Sequence
  Cyclic GFR-binding peptide
  MOD_RES (18)..(19): Xaa is C or S
TRGVIFLISIPSLDQPVXXPSASA

SEQ ID NO: 8136 - protein, 14 aa, Artificial Sequence
  Cyclic GFR-binding peptide
  MOD_RES (14)..(14): Xaa is C or S
LYLISIASLRTPVX

SEQ ID NO: 8137 - protein, 19 aa, Artificial Sequence
  Cyclic GFR-binding peptide
IVNSSDDIFLVSIPSLKTP

SEQ ID NO: 8138 - protein, 21 aa, Artificial Sequence
  Cyclic GFR-binding peptide
  MOD_RES (15)..(16): Xaa is C or S
VYYLITLPELAQPVXXPAASA

SEQ ID NO: 8139 - protein, 20 aa, Artificial Sequence
  Cyclic GFR-binding peptide
  MOD_RES (14)..(15): Xaa is C or S
YYVIPLPELRTPVXXTPPTS

SEQ ID NO: 8140 - protein, 23 aa, Artificial Sequence
  Cyclic GFR-binding peptide
  MOD_RES (17)..(18): Xaa is C or S
SDDYYLVTLPELQTPAXXPKPVT

SEQ ID NO: 8141 - protein, 26 aa, Artificial Sequence
  Cyclic GFR-binding peptide
  MOD_RES (20)..(21): Xaa is C or S
VKDYEDYYLMTLPELETPVXXAKPIS

SEQ ID NO: 8142 - protein, 19 aa, Artificial Sequence
  Cyclic GFR-binding peptide
IVNSSDDIFLVSIPSLQTP

SEQ ID NO: 8143 - protein, 24 aa, Artificial Sequence
  Cyclic GFR-binding peptide
  MOD_RES (18)..(19): Xaa is C or S
ENEDYYLMTLPELETPVXXAKPIK

SEQ ID NO: 8144 - protein, 21 aa, Artificial Sequence
  Cyclic GFR-binding peptide
  MOD_RES (15)..(16): Xaa is C or S
DIFLVSIPSLKTPAXXPKPVY

SEQ ID NO: 8145 - protein, 15 aa, Artificial Sequence
  Cyclic GFR-binding peptide
VVKENEDIFLMSIPS

SEQ ID NO: 8146 - protein, 23 aa, Artificial Sequence
  Cyclic GFR-binding peptide
  MOD_RES (17)..(18): Xaa is C or S
SDDYYLVTLPELKTPAXXPKPVY

SEQ ID NO: 8147 - protein, 26 aa, Artificial Sequence
  Cyclic GFR-binding peptide
  MOD_RES (20)..(21): Xaa is C or S
VNNASDLYLISIASLRTPVXXTPPTS

SEQ ID NO: 8148 - protein, 17 aa, Artificial Sequence
  Cyclic GFR-binding peptide
  MOD_RES (14)..(15): Xaa is C or S
YYVMPLPELETPVXXAK

SEQ ID NO: 8149 - protein, 26 aa, Artificial Sequence
  Cyclic GFR-binding peptide
  MOD_RES (20)..(21): Xaa is C or S
VNSSDDIFLVSIPSLQTPAXXPKPVT

SEQ ID NO: 8150 - protein, 15 aa, Artificial Sequence
  Cyclic GFR-binding peptide
  MOD_RES (14)..(15): Xaa is C or S
YYVVPLPELQTPAXX

SEQ ID NO: 8151 - protein, 27 aa, Artificial Sequence
  Cyclic GFR-binding peptide
  MOD_RES (21)..(22): Xaa is C or S
VKPKRGVYYLITLPELAQPVXXPAASA

SEQ ID NO: 8152 - protein, 19 aa, Artificial Sequence
  Cyclic GFR-binding peptide
  MOD_RES (14)..(15): Xaa is C or S
IFLISIPSLDQSVXXPSAS

SEQ ID NO: 8153 - protein, 16 aa, Artificial Sequence
  Cyclic GFR-binding peptide
VKPTRGVIFLISIPSL

SEQ ID NO: 8154 - protein, 27 aa, Artificial Sequence
  Cyclic GFR-binding peptide
  MOD_RES (21)..(22): Xaa is C or S
IVNSSDDYYVVPLPELQTPAXXPKPVT

SEQ ID NO: 8155 - protein, 20 aa, Artificial Sequence
  Cyclic GFR-binding peptide
  MOD_RES (14)..(15): Xaa is C or S
YYVVPLPELQTPAXXPKPVT

SEQ ID NO: 8156 - protein, 16 aa, Artificial Sequence
  Cyclic GFR-binding peptide
  MOD_RES (14)..(15): Xaa is C or S
YYVVPLPELQTPAXXP

SEQ ID NO: 8157 - protein, 25 aa, Artificial Sequence
  Cyclic GFR-binding peptide
  MOD_RES (19)..(20): Xaa is C or S
PKRGVYYLITLPELAQPVXXPAASA

SEQ ID NO: 8158 - protein, 16 aa, Artificial Sequence
  Cyclic GFR-binding peptide
IVNSSDDIFLVSIPSL

SEQ ID NO: 8159 - protein, 21 aa, Artificial Sequence
  Cyclic GFR-binding peptide
  MOD_RES (15)..(16): Xaa is C or S
DYYLVTLPELKTPAXXPKPVY

SEQ ID NO: 8160 - protein, 17 aa, Artificial Sequence
  Cyclic GFR-binding peptide
VKPKRGVYYLITLPELA

SEQ ID NO: 8161 - protein, 26 aa, Artificial Sequence
  Cyclic GFR-binding peptide
  MOD_RES (20)..(21): Xaa is C or S
VNSSDDYYVVPLPELKTPAXXPKPVY

SEQ ID NO: 8162 - protein, 22 aa, Artificial Sequence
  Cyclic GFR-binding peptide
  MOD_RES (16)..(17): Xaa is C or S
EDYYVMPLPELETPVXXAKPIS

SEQ ID NO: 8163 - protein, 24 aa, Artificial Sequence
  Cyclic GFR-binding peptide
  MOD_RES (18)..(19): Xaa is C or S
SSDDYYVVPLPELQTPAXXPKPVT

SEQ ID NO: 8164 - protein, 19 aa, Artificial Sequence
  Cyclic GFR-binding peptide
  MOD_RES (14)..(15): Xaa is C or S
YYVVPLPELQTPAXXPKPV

SEQ ID NO: 8165 - protein, 27 aa, Artificial Sequence
  Cyclic GFR-binding peptide
  MOD_RES (21)..(22): Xaa is C or S
VKPTRGVIFLISIPSLDQPVXXPSASA

SEQ ID NO: 8166 - protein, 15 aa, Artificial Sequence
  Cyclic GFR-binding peptide
  MOD_RES (14)..(15): Xaa is C or S
YYLVTLPELQTPAXX

SEQ ID NO: 8167 - protein, 26 aa, Artificial Sequence
  Cyclic GFR-binding peptide
  MOD_RES (20)..(20): Xaa is C or S
VNSSDDYYLVTLPELKTPAXTPKTVH

SEQ ID NO: 8168 - protein, 15 aa, Artificial Sequence
  Cyclic GFR-binding peptide
VKPKRGVYYLITLPE

SEQ ID NO: 8169 - protein, 18 aa, Artificial Sequence
  Cyclic GFR-binding peptide
  MOD_RES (14)..(15): Xaa is C or S
YYVIPLPELDQPVXXPSA

SEQ ID NO: 8170 - protein, 21 aa, Artificial Sequence
  Cyclic GFR-binding peptide
  MOD_RES (15)..(16): Xaa is C or S
DYYLITLPELRTPVXXTPPTS

SEQ ID NO: 8171 - protein, 24 aa, Artificial Sequence
  Cyclic GFR-binding peptide
  MOD_RES (18)..(19): Xaa is C or S
DYEDIFLMSIPSLETPVXXAKPIS

SEQ ID NO: 8172 - protein, 15 aa, Artificial Sequence
  Cyclic GFR-binding peptide
  MOD_RES (14)..(15): Xaa is C or S
LYLISIASLRTPVXX

SEQ ID NO: 8173 - protein, 21 aa, Artificial Sequence
  Cyclic GFR-binding peptide
  MOD_RES (15)..(15): Xaa is C or S
DIFLVSIPSLKTPAXTPKTVH

SEQ ID NO: 8174 - protein, 17 aa, Artificial Sequence
  Cyclic GFR-binding peptide
VVNNASDYYLITLPELR

SEQ ID NO: 8175 - protein, 24 aa, Artificial Sequence
  Cyclic GFR-binding peptide
  MOD_RES (18)..(19): Xaa is C or S
SSDDYYLVTLPELKTPAXXPKPVY

SEQ ID NO: 8176 - protein, 15 aa, Artificial Sequence
  Cyclic GFR-binding peptide
  MOD_RES (14)..(15): Xaa is C or S
FYLISIANLRTPVXX

SEQ ID NO: 8177 - protein, 22 aa, Artificial Sequence
  Cyclic GFR-binding peptide
  MOD_RES (16)..(17): Xaa is C or S
SDYYLITLPELRTPVXXTPPTS

SEQ ID NO: 8178 - protein, 25 aa, Artificial Sequence
  Cyclic GFR-binding peptide
  MOD_RES (19)..(19): Xaa is C or S
NSSDDYYVVPLPELKTPAXTPKTVH

SEQ ID NO: 8179 - protein, 15 aa, Artificial Sequence
  Cyclic GFR-binding peptide
IVNSSDDYYVVPLPE

SEQ ID NO: 8180 - protein, 20 aa, Artificial Sequence
  Cyclic GFR-binding peptide
  MOD_RES (14)..(15): Xaa is C or S
YYVMPLPELETPVXXAKPIK

SEQ ID NO: 8181 - protein, 27 aa, Artificial Sequence
  Cyclic GFR-binding peptide
  MOD_RES (21)..(21): Xaa is C or S
IVNSSDDYYLVTLPELKTPAXTPKTVH

SEQ ID NO: 8182 - protein, 21 aa, Artificial Sequence
  Cyclic GFR-binding peptide
  MOD_RES (15)..(15): Xaa is C or S
DYYVVPLPELKTPAXTPKTVH

SEQ ID NO: 8183 - protein, 23 aa, Artificial Sequence
  Cyclic GFR-binding peptide
  MOD_RES (17)..(18): Xaa is C or S
SDDIFLVSIPSLKTPAXXPKPVY

SEQ ID NO: 8184 - protein, 16 aa, Artificial Sequence
  Cyclic GFR-binding peptide
VVNNASDFYLISIANL

SEQ ID NO: 8185 - protein, 16 aa, Artificial Sequence
  Cyclic GFR-binding peptide
IKPTKGIYYVIPLPEL

SEQ ID NO: 8186 - protein, 15 aa, Artificial Sequence
  Cyclic GFR-binding peptide
  MOD_RES (14)..(15): Xaa is C or S
YYLVTLPELKTPAXX

SEQ ID NO: 8187 - protein, 25 aa, Artificial Sequence
  Cyclic GFR-binding peptide
  MOD_RES (19)..(19): Xaa is C or S
NSSDDIFLVSIPSLKTPAXTPKTVH

SEQ ID NO: 8188 - protein, 20 aa, Artificial Sequence
  Cyclic GFR-binding peptide
  MOD_RES (14)..(14): Xaa is C or S
YYLVTLPELKTPAXTPKTVH

SEQ ID NO: 8189 - protein, 26 aa, Artificial Sequence
  Cyclic GFR-binding peptide
  MOD_RES (20)..(21): Xaa is C or S
KPKRGVIFLISIPSLAQPVXXPAASA

SEQ ID NO: 8190 - protein, 14 aa, Artificial Sequence
  Cyclic GFR-binding peptide
  MOD_RES (14)..(14): Xaa is C or S
YYVVPLPELKTPAX

SEQ ID NO: 8191 - protein, 18 aa, Artificial Sequence
  Cyclic GFR-binding peptide
VVKDYEDYYLMTLPELET

SEQ ID NO: 8192 - protein, 16 aa, Artificial Sequence
  Cyclic GFR-binding peptide
  MOD_RES (14)..(15): Xaa is C or S
YYVIPLPELRTPVXXT

SEQ ID NO: 8193 - protein, 15 aa, Artificial Sequence
  Cyclic GFR-binding peptide
VVNNASDYYLITLPE

SEQ ID NO: 8194 - protein, 16 aa, Artificial Sequence
  Cyclic GFR-binding peptide
  MOD_RES (14)..(15): Xaa is C or S
YYLVTLPELQTPAXXP

SEQ ID NO: 8195 - protein, 17 aa, Artificial Sequence
  Cyclic GFR-binding peptide
IVNSSDDYYLVTLPELK

SEQ ID NO: 8196 - protein, 17 aa, Artificial Sequence
  Cyclic GFR-binding peptide
VVKDYEDYYVMPLPELE

SEQ ID NO: 8197 - protein, 19 aa, Artificial Sequence
  Cyclic GFR-binding peptide
  MOD_RES (14)..(14): Xaa is C or S
YYVVPLPELKTPAXTPKTV

SEQ ID NO: 8198 - protein, 25 aa, Artificial Sequence
  Cyclic GFR-binding peptide
  MOD_RES (19)..(20): Xaa is C or S
NNASDYYVIPLPELRTPVXXTPPTS

SEQ ID NO: 8199 - protein, 23 aa, Artificial Sequence
  Cyclic GFR-binding peptide
  MOD_RES (17)..(18): Xaa is C or S
SDDIFLVSIPSLQTPAXXPKPVT

SEQ ID NO: 8200 - protein, 17 aa, Artificial Sequence
  Cyclic GFR-binding peptide
IVNSSDDYYLVTLPELQ

SEQ ID NO: 8201 - protein, 27 aa, Artificial Sequence
  Cyclic GFR-binding peptide
  MOD_RES (21)..(22): Xaa is C or S
VVKDYEDYYLMTLPELETPVXXAKPIS

SEQ ID NO: 8202 - protein, 22 aa, Artificial Sequence
  Cyclic GFR-binding peptide
  MOD_RES (16)..(17): Xaa is C or S
DDIFLVSIPSLQTPAXXPKPVT

SEQ ID NO: 8203 - protein, 22 aa, Artificial Sequence
  Cyclic GFR-binding peptide
  MOD_RES (16)..(17): Xaa is C or S
GVIFLISIPSLDQPVXXPSASA

SEQ ID NO: 8204 - protein, 22 aa, Artificial Sequence
  Cyclic GFR-binding peptide
  MOD_RES (16)..(17): Xaa is C or S
DDIFLVSIPSLKTPAXXPKPVY

SEQ ID NO: 8205 - protein, 13 aa, Artificial Sequence
  Cyclic GFR-binding peptide
APTKLSPISVLFI

SEQ ID NO: 8206 - protein, 20 aa, Artificial Sequence
  Cyclic GFR-binding peptide
  MOD_RES (7)..(7): Xaa is C or S
HVTKPTXAPTKLSPISVLFI

SEQ ID NO: 8207 - protein, 27 aa, Artificial Sequence
  Cyclic GFR-binding peptide
  MOD_RES (6)..(7): Xaa is C or S
SIPKAXXVPTELEPLPMVYYDEYDKVV

SEQ ID NO: 8208 - protein, 23 aa, Artificial Sequence
  Cyclic GFR-binding peptide
  MOD_RES (6)..(7): Xaa is C or S
YVPKPXXAPTKLEPLPVVYYDDS

SEQ ID NO: 8209 - protein, 24 aa, Artificial Sequence
  Cyclic GFR-binding peptide
  MOD_RES (6)..(7): Xaa is C or S
STPPTXXVPTRLSAISILYLDSAN

SEQ ID NO: 8210 - protein, 26 aa, Artificial Sequence
  Cyclic GFR-binding peptide
  MOD_RES (6)..(7): Xaa is C or S
YVPKPXXAPTKLSPISVLFIDDSSNV

SEQ ID NO: 8211 - protein, 19 aa, Artificial Sequence
  Cyclic GFR-binding peptide
  MOD_RES (5)..(6): Xaa is C or S
VPKPXXAPTKLEPLTVLYY

SEQ ID NO: 8212 - protein, 15 aa, Artificial Sequence
  Cyclic GFR-binding peptide
SPISILFIVGRTPKV

SEQ ID NO: 8213 - protein, 24 aa, Artificial Sequence
  Cyclic GFR-binding peptide
  MOD_RES (6)..(7): Xaa is C or S
YVPKPXXAPTKLSPISVLFIDDSS

SEQ ID NO: 8214 - protein, 26 aa, Artificial Sequence
  Cyclic GFR-binding peptide
  MOD_RES (7)..(7): Xaa is C or S
HVTKPTXAPTKLSPISVLFIDDSSNV

SEQ ID NO: 8215 - protein, 20 aa, Artificial Sequence
  Cyclic GFR-binding peptide
  MOD_RES (6)..(7): Xaa is C or S
SIPKAXXVPTELSPISMLFI

SEQ ID NO: 8216 - protein, 19 aa, Artificial Sequence
  Cyclic GFR-binding peptide
  MOD_RES (5)..(6): Xaa is C or S
VPKPXXAPTKLEPLPVVYY

SEQ ID NO: 8217 - protein, 26 aa, Artificial Sequence
  Cyclic GFR-binding peptide
  MOD_RES (6)..(7): Xaa is C or S
TVPKPXXAPTQLEPLTVLYYDDSSNV

SEQ ID NO: 8218 - protein, 23 aa, Artificial Sequence
  Cyclic GFR-binding peptide
  MOD_RES (6)..(7): Xaa is C or S
ASASPXXVSQDLSPISILFIIGK

SEQ ID NO: 8219 - protein, 16 aa, Artificial Sequence
  Cyclic GFR-binding peptide
  MOD_RES (2)..(3): Xaa is C or S
PXXVPQDLEPLPIVYY

SEQ ID NO: 8220 - protein, 20 aa, Artificial Sequence
  Cyclic GFR-binding peptide
  MOD_RES (6)..(7): Xaa is C or S
ASASPXXVSQDLEPLPIVYY

SEQ ID NO: 8221 - protein, 20 aa, Artificial Sequence
  Cyclic GFR-binding peptide
  MOD_RES (6)..(7): Xaa is C or S
STPPTXXVPTRLSAISILYL

SEQ ID NO: 8222 - protein, 17 aa, Artificial Sequence
  Cyclic GFR-binding peptide
DLEPLPIVYYVGRTPKV

SEQ ID NO: 8223 - protein, 16 aa, Artificial Sequence
  Cyclic GFR-binding peptide
LSPISILFIIGKTPKI

SEQ ID NO: 8224 - protein, 18 aa, Artificial Sequence
  Cyclic GFR-binding peptide
TELSPISMLFIDENEKVV

SEQ ID NO: 8225 - protein, 15 aa, Artificial Sequence
  Cyclic GFR-binding peptide
NAISILYFDSANNVV

SEQ ID NO: 8226 - protein, 19 aa, Artificial Sequence
  Cyclic GFR-binding peptide
PTKLEPLPVVYYDDSSNVI

SEQ ID NO: 8227 - protein, 14 aa, Artificial Sequence
  Cyclic GFR-binding peptide
  MOD_RES (1)..(1): Xaa is C or S
XVPTRLEPLPIVYY

SEQ ID NO: 8228 - protein, 19 aa, Artificial Sequence
  Cyclic GFR-binding peptide
PTQLEPLPVVYYDDSSNVI

SEQ ID NO: 8229 - protein, 15 aa, Artificial Sequence
  Cyclic GFR-binding peptide
SAISILYLDSANNVV

SEQ ID NO: 8230 - protein, 20 aa, Artificial Sequence
  Cyclic GFR-binding peptide
  MOD_RES (6)..(7): Xaa is C or S
KIPKAXXVPTELEPLTMLYY

SEQ ID NO: 8231 - protein, 15 aa, Artificial Sequence
  Cyclic GFR-binding peptide
EPLTMLYYDEYDKVV

SEQ ID NO: 8232 - protein, 15 aa, Artificial Sequence
  Cyclic GFR-binding peptide
  MOD_RES (1)..(2): Xaa is C or S
XXAPTKLEPLPVVYY

SEQ ID NO: 8233 - protein, 15 aa, Artificial Sequence
  Cyclic GFR-binding peptide
  MOD_RES (2)..(2): Xaa is C or S
TXAPTKLSPISVLFI

SEQ ID NO: 8234 - protein, 24 aa, Artificial Sequence
  Cyclic GFR-binding peptide
  MOD_RES (6)..(7): Xaa is C or S
ASAAPXXVPQALSPISILFIVGRK

SEQ ID NO: 8235 - protein, 13 aa, Artificial Sequence
  Cyclic GFR-binding peptide
APTKLEPLPVVYY

SEQ ID NO: 8236 - protein, 20 aa, Artificial Sequence
  Cyclic GFR-binding peptide
  MOD_RES (6)..(7): Xaa is C or S
SIPKAXXVPTELEPLPMVYY

SEQ ID NO: 8237 - protein, 27 aa, Artificial Sequence
  Cyclic GFR-binding peptide
  MOD_RES (6)..(7): Xaa is C or S
TVPKPXXAPTQLSPISVLFIDDSSNVI

SEQ ID NO: 8238 - protein, 14 aa, Artificial Sequence
  Cyclic GFR-binding peptide
  MOD_RES (1)..(1): Xaa is C or S
XVPTRLEPLTILYY

SEQ ID NO: 8239 - protein, 18 aa, Artificial Sequence
  Cyclic GFR-binding peptide
TRLNAISILYFDSANNVV

SEQ ID NO: 8240 - protein, 14 aa, Artificial Sequence
  Cyclic GFR-binding peptide
  MOD_RES (1)..(1): Xaa is C or S
XAPTKLEPLTVLYY

SEQ ID NO: 8241 - protein, 19 aa, Artificial Sequence
  Cyclic GFR-binding peptide
PQALEPLTILYYVGRKPKV

SEQ ID NO: 8242 - protein, 19 aa, Artificial Sequence
  Cyclic GFR-binding peptide
  MOD_RES (6)..(6): Xaa is C or S
VTKPTXAPTKLEPLTVLYY

SEQ ID NO: 8243 - protein, 15 aa, Artificial Sequence
  Cyclic GFR-binding peptide
  MOD_RES (2)..(2): Xaa is C or S
TXAPTKLEPLPVVYY

SEQ ID NO: 8244 - protein, 24 aa, Artificial Sequence
  Cyclic GFR-binding peptide
  MOD_RES (7)..(7): Xaa is C or S
HVTKPTXAPTKLEPLTVLYYDDSS

SEQ ID NO: 8245 - protein, 22 aa, Artificial Sequence
  Cyclic GFR-binding peptide
  MOD_RES (6)..(7): Xaa is C or S
ASAAPXXVPQALEPLTILYYVG

SEQ ID NO: 8246 - protein, 20 aa, Artificial Sequence
  Cyclic GFR-binding peptide
  MOD_RES (6)..(7): Xaa is C or S
ASASPXXVSQDLSPISILFI

SEQ ID NO: 8247 - protein, 18 aa, Artificial Sequence
  Cyclic GFR-binding peptide
QALEPLTILYYVGRKPKV

SEQ ID NO: 8248 - protein, 22 aa, Artificial Sequence
  Cyclic GFR-binding peptide
  MOD_RES (6)..(7): Xaa is C or S
KIPKAXXVPTELEPLPMVYYDE

SEQ ID NO: 8249 - protein, 18 aa, Artificial Sequence
  Cyclic GFR-binding peptide
  MOD_RES (4)..(5): Xaa is C or S
ASPXXVPQDLSPISILFI

SEQ ID NO: 8250 - protein, 20 aa, Artificial Sequence
  Cyclic GFR-binding peptide
  MOD_RES (7)..(7): Xaa is C or S
HVTKPTXAPTKLEPLPVVYY

SEQ ID NO: 8251 - protein, 16 aa, Artificial Sequence
  Cyclic GFR-binding peptide
LSPISILFIVGRKPKV

SEQ ID NO: 8252 - protein, 26 aa, Artificial Sequence
  Cyclic GFR-binding peptide
  MOD_RES (6)..(7): Xaa is C or S
KIPKAXXVPTELEPLPMVYYDENEKV

SEQ ID NO: 8253 - protein, 23 aa, Artificial Sequence
  Cyclic GFR-binding peptide
  MOD_RES (6)..(7): Xaa is C or S
ASASPXXVPQDLSPISILFIVGR

SEQ ID NO: 8254 - protein, 16 aa, Artificial Sequence
  Cyclic GFR-binding peptide
  MOD_RES (2)..(3): Xaa is C or S
PXXVPQDLSPISILFI

SEQ ID NO: 8255 - protein, 22 aa, Artificial Sequence
  Cyclic GFR-binding peptide
  MOD_RES (6)..(7): Xaa is C or S
STPPTXXVPTRLEPLPIVYYDS

SEQ ID NO: 8256 - protein, 17 aa, Artificial Sequence
  Cyclic GFR-binding peptide
  MOD_RES (3)..(4): Xaa is C or S
KAXXVPTELEPLTMLYY

SEQ ID NO: 8257 - protein, 19 aa, Artificial Sequence
  Cyclic GFR-binding peptide
SQDLSPISILFIIGKTPKI

SEQ ID NO: 8258 - protein, 22 aa, Artificial Sequence
  Cyclic GFR-binding peptide
  MOD_RES (7)..(7): Xaa is C or S
HVTKPTXAPTKLEPLPVVYYDD

SEQ ID NO: 8259 - protein, 25 aa, Artificial Sequence
  Cyclic GFR-binding peptide
  MOD_RES (6)..(7): Xaa is C or S
KIPKAXXVPTELEPLTMLYYDENEK

SEQ ID NO: 8260 - protein, 18 aa, Artificial Sequence
  Cyclic GFR-binding peptide
  MOD_RES (4)..(5): Xaa is C or S
AAPXXVPQALSPISILFI

SEQ ID NO: 8261 - protein, 16 aa, Artificial Sequence
  Cyclic GFR-binding peptide
LSAISILYLDSANNVV

SEQ ID NO: 8262 - protein, 21 aa, Artificial Sequence
  Cyclic GFR-binding peptide
  MOD_RES (6)..(7): Xaa is C or S
YVPKPXXAPTKLEPLPVVYYD

SEQ ID NO: 8263 - protein, 16 aa, Artificial Sequence
  Cyclic GFR-binding peptide
LEPLTMLYYDEYDKVV

SEQ ID NO: 8264 - protein, 25 aa, Artificial Sequence
  Cyclic GFR-binding peptide
  MOD_RES (6)..(7): Xaa is C or S
STPPTXXVPTRLNAISILYFDSANN

SEQ ID NO: 8265 - protein, 25 aa, Artificial Sequence
  Cyclic GFR-binding peptide
  MOD_RES (6)..(7): Xaa is C or S
KIPKAXXVPTELEPLPMVYYDENEK

SEQ ID NO: 8266 - protein, 17 aa, Artificial Sequence
  Cyclic GFR-binding peptide
QLEPLPVVYYDDSSNVI

SEQ ID NO: 8267 - protein, 17 aa, Artificial Sequence
  Cyclic GFR-binding peptide
DLEPLPIVYYIGKTPKI

SEQ ID NO: 8268 - protein, 27 aa, Artificial Sequence
  Cyclic GFR-binding peptide
  MOD_RES (6)..(7): Xaa is C or S
ASAAPXXVPQALSPISILFIVGRKPKV

SEQ ID NO: 8269 - protein, 17 aa, Artificial Sequence
  Cyclic GFR-binding peptide
KLEPLPVVYYDDSSNVI

SEQ ID NO: 8270 - protein, 23 aa, Artificial Sequence
  Cyclic GFR-binding peptide
  MOD_RES (6)..(7): Xaa is C or S
STPPTXXVPTRLEPLPIVYYDSA

SEQ ID NO: 8271 - protein, 15 aa, Artificial Sequence
  Cyclic GFR-binding peptide
EPLPIVYYIGKTPKI

SEQ ID NO: 8272 - protein, 27 aa, Artificial Sequence
  Cyclic GFR-binding peptide
  MOD_RES (6)..(7): Xaa is C or S
STPPTXXVPTRLEPLPIVYYDSANNVV

SEQ ID NO: 8273 - protein, 21 aa, Artificial Sequence
  Cyclic GFR-binding peptide
  MOD_RES (6)..(7): Xaa is C or S
TVPKPXXAPTQLEPLPVVYYD

SEQ ID NO: 8274 - protein, 15 aa, Artificial Sequence
  Cyclic GFR-binding peptide
  MOD_RES (1)..(2): Xaa is C or S
XXVPTRLEPLPIVYY

SEQ ID NO: 8275 - protein, 24 aa, Artificial Sequence
  Cyclic GFR-binding peptide
  MOD_RES (6)..(7): Xaa is C or S
STPPTXXVPTRLEPLPIVYYDSAN

SEQ ID NO: 8276 - protein, 19 aa, Artificial Sequence
  Cyclic GFR-binding peptide
PTELEPLTMLYYDEYDKVV

SEQ ID NO: 8277 - protein, 24 aa, Artificial Sequence
  Cyclic GFR-binding peptide
  MOD_RES (6)..(7): Xaa is C or S
ASASPXXVPQDLEPLPIVYYVGRT

SEQ ID NO: 8278 - protein, 25 aa, Artificial Sequence
  Cyclic GFR-binding peptide
  MOD_RES (6)..(7): Xaa is C or S
ASASPXXVPQDLSPISILFIVGRTP

SEQ ID NO: 8279 - protein, 27 aa, Artificial Sequence
  Cyclic GFR-binding peptide
  MOD_RES (6)..(7): Xaa is C or S
KIPKAXXVPTELEPLTMLYYDENEKVV

SEQ ID NO: 8280 - protein, 16 aa, Artificial Sequence
  Cyclic GFR-binding peptide
  MOD_RES (2)..(3): Xaa is C or S
PXXVSQDLEPLPIVYY

SEQ ID NO: 8281 - protein, 20 aa, Artificial Sequence
  Cyclic GFR-binding peptide
  MOD_RES (6)..(7): Xaa is C or S
SIPKAXXVPTELEPLTMLYY

SEQ ID NO: 8282 - protein, 22 aa, Artificial Sequence
  Cyclic GFR-binding peptide
  MOD_RES (6)..(7): Xaa is C or S
KIPKAXXVPTELEPLTMLYYDE

SEQ ID NO: 8283 - protein, 25 aa, Artificial Sequence
  Cyclic GFR-binding peptide
  MOD_RES (6)..(7): Xaa is C or S
TVPKPXXAPTQLEPLTVLYYDDSSN

SEQ ID NO: 8284 - protein, 18 aa, Artificial Sequence
  Cyclic GFR-binding peptide
QDLEPLPIVYYVGRTPKV

SEQ ID NO: 8285 - protein, 27 aa, Artificial Sequence
  Cyclic GFR-binding peptide
  MOD_RES (6)..(7): Xaa is C or S
YVPKPXXAPTKLSPISVLFIDDSSNVI

SEQ ID NO: 8286 - protein, 14 aa, Artificial Sequence
  Cyclic GFR-binding peptide
  MOD_RES (1)..(1): Xaa is C or S
XAPTKLSPISVLFI

SEQ ID NO: 8287 - protein, 27 aa, Artificial Sequence
  Cyclic GFR-binding peptide
  MOD_RES (7)..(7): Xaa is C or S
HVTKPTXAPTKLEPLPVVYYDDSSNVI

SEQ ID NO: 8288 - protein, 26 aa, Artificial Sequence
  Cyclic GFR-binding peptide
  MOD_RES (6)..(7): Xaa is C or S
YVPKPXXAPTKLEPLTVLYYDDSSNV

SEQ ID NO: 8289 - protein, 15 aa, Artificial Sequence
  Cyclic GFR-binding peptide
  MOD_RES (1)..(2): Xaa is C or S
XXVPTRLEPLTILYY

SEQ ID NO: 8290 - protein, 16 aa, Artificial Sequence
  Cyclic GFR-binding peptide
  MOD_RES (2)..(3): Xaa is C or S
PXXAPTQLSPISVLFI

SEQ ID NO: 8291 - protein, 19 aa, Artificial Sequence
  Cyclic GFR-binding peptide
  MOD_RES (5)..(6): Xaa is C or S
VPKPXXAPTKLSPISVLFI

SEQ ID NO: 8292 - protein, 24 aa, Artificial Sequence
  Cyclic GFR-binding peptide
  MOD_RES (6)..(7): Xaa is C or S
KIPKAXXVPTELEPLPMVYYDENE

SEQ ID NO: 8293 - protein, 16 aa, Artificial Sequence
  Cyclic GFR-binding peptide
LEPLPVVYYDDSSNVI

SEQ ID NO: 8294 - protein, 26 aa, Artificial Sequence
  Cyclic GFR-binding peptide
  MOD_RES (6)..(7): Xaa is C or S
STPPTXXVPTRLEPLPIVYYDSANNV

SEQ ID NO: 8295 - protein, 25 aa, Artificial Sequence
  Cyclic GFR-binding peptide
  MOD_RES (6)..(7): Xaa is C or S
STPPTXXVPTRLSAISILYLDSANN

SEQ ID NO: 8296 - protein, 19 aa, Artificial Sequence
  Cyclic GFR-binding peptide
  MOD_RES (5)..(6): Xaa is C or S
TPPTXXVPTRLEPLPIVYY

SEQ ID NO: 8297 - protein, 23 aa, Artificial Sequence
  Cyclic GFR-binding peptide
  MOD_RES (6)..(7): Xaa is C or S
SIPKAXXVPTELEPLTMLYYDEY

SEQ ID NO: 8298 - protein, 23 aa, Artificial Sequence
  Cyclic GFR-binding peptide
  MOD_RES (6)..(7): Xaa is C or S
ASASPXXVSQDLEPLPIVYYIGK

SEQ ID NO: 8299 - protein, 17 aa, Artificial Sequence
  Cyclic GFR-binding peptide
ELEPLTMLYYDEYDKVV

SEQ ID NO: 8300 - protein, 15 aa, Artificial Sequence
  Cyclic GFR-binding peptide
  MOD_RES (1)..(2): Xaa is C or S
XXAPTKLSPISVLFI

SEQ ID NO: 8301 - protein, 23 aa, Artificial Sequence
  Cyclic GFR-binding peptide
  MOD_RES (6)..(7): Xaa is C or S
SIPKAXXVPTELEPLPMVYYDEY

SEQ ID NO: 8302 - protein, 21 aa, Artificial Sequence
  Cyclic GFR-binding peptide
  MOD_RES (6)..(7): Xaa is C or S
ASASPXXVPQDLEPLPIVYYV

SEQ ID NO: 8303 - protein, 19 aa, Artificial Sequence
  Cyclic GFR-binding peptide
PTRLNAISILYFDSANNVV

SEQ ID NO: 8304 - protein, 18 aa, Artificial Sequence
  Cyclic GFR-binding peptide
  MOD_RES (4)..(5): Xaa is C or S
PKPXXAPTKLSPISVLFI

SEQ ID NO: 8305 - protein, 22 aa, Artificial Sequence
  Cyclic GFR-binding peptide
  MOD_RES (6)..(7): Xaa is C or S
ASASPXXVSQDLEPLPIVYYIG

SEQ ID NO: 8306 - protein, 22 aa, Artificial Sequence
  Cyclic GFR-binding peptide
  MOD_RES (7)..(7): Xaa is C or S
HVTKPTXAPTKLSPISVLFIDD

SEQ ID NO: 8307 - protein, 18 aa, Artificial Sequence
  Cyclic GFR-binding peptide
  MOD_RES (4)..(5): Xaa is C or S
PKPXXAPTQLSPISVLFI

SEQ ID NO: 8308 - protein, 18 aa, Artificial Sequence
  Cyclic GFR-binding peptide
TRLSAISILYLDSANNVV

SEQ ID NO: 8309 - protein, 19 aa, Artificial Sequence
  Cyclic GFR-binding peptide
  MOD_RES (6)..(6): Xaa is C or S
VTKPTXAPTKLSPISVLFI

SEQ ID NO: 8310 - protein, 15 aa, Artificial Sequence
  Cyclic GFR-binding peptide
EPLPIVYYDSANNVV

SEQ ID NO: 8311 - protein, 21 aa, Artificial Sequence
  Cyclic GFR-binding peptide
  MOD_RES (6)..(7): Xaa is C or S
KIPKAXXVPTELSPISMLFID

SEQ ID NO: 8312 - protein, 18 aa, Artificial Sequence
  Cyclic GFR-binding peptide
TQLEPLTVLYYDDSSNVI

SEQ ID NO: 8313 - protein, 22 aa, Artificial Sequence
  Cyclic GFR-binding peptide
  MOD_RES (6)..(7): Xaa is C or S
YVPKPXXAPTKLEPLTVLYYDD

SEQ ID NO: 8314 - protein, 19 aa, Artificial Sequence
  Cyclic GFR-binding peptide
PTELSPISMLFIDENEKVV

SEQ ID NO: 8315 - protein, 24 aa, Artificial Sequence
  Cyclic GFR-binding peptide
  MOD_RES (6)..(7): Xaa is C or S
TVPKPXXAPTQLSPISVLFIDDSS

SEQ ID NO: 8316 - protein, 23 aa, Artificial Sequence
  Cyclic GFR-binding peptide
  MOD_RES (6)..(7): Xaa is C or S
ASASPXXVPQDLEPLPIVYYVGR

SEQ ID NO: 8317 - protein, 18 aa, Artificial Sequence
  Cyclic GFR-binding peptide
TKLEPLTVLYYDDSSNVI

SEQ ID NO: 8318 - protein, 21 aa, Artificial Sequence
  Cyclic GFR-binding peptide
  MOD_RES (6)..(7): Xaa is C or S
SIPKAXXVPTELEPLPMVYYD

SEQ ID NO: 8319 - protein, 13 aa, Artificial Sequence
  Cyclic GFR-binding peptide
VPTRLEPLPIVYY

SEQ ID NO: 8320 - protein, 20 aa, Artificial Sequence
  Cyclic GFR-binding peptide
  MOD_RES (6)..(7): Xaa is C or S
KIPKAXXVPTELSPISMLFI

SEQ ID NO: 8321 - protein, 15 aa, Artificial Sequence
  Cyclic GFR-binding peptide
  MOD_RES (2)..(2): Xaa is C or S
TXAPTKLEPLTVLYY

SEQ ID NO: 8322 - protein, 25 aa, Artificial Sequence
  Cyclic GFR-binding peptide
  MOD_RES (6)..(7): Xaa is C or S
YVPKPXXAPTKLEPLPVVYYDDSSN

SEQ ID NO: 8323 - protein, 24 aa, Artificial Sequence
  Cyclic GFR-binding peptide
  MOD_RES (6)..(7): Xaa is C or S
STPPTXXVPTRLNAISILYFDSAN

SEQ ID NO: 8324 - protein, 18 aa, Artificial Sequence
  Cyclic GFR-binding peptide
  MOD_RES (4)..(5): Xaa is C or S
ASPXXVSQDLSPISILFI

SEQ ID NO: 8325 - protein, 22 aa, Artificial Sequence
  Cyclic GFR-binding peptide
  MOD_RES (6)..(7): Xaa is C or S
ASASPXXVPQDLEPLPIVYYVG

SEQ ID NO: 8326 - protein, 17 aa, Artificial Sequence
  Cyclic GFR-binding peptide
ELSPISMLFIDENEKVV

SEQ ID NO: 8327 - protein, 19 aa, Artificial Sequence
  Cyclic GFR-binding peptide
SQDLEPLPIVYYIGKTPKI

SEQ ID NO: 8328 - protein, 18 aa, Artificial Sequence
  Cyclic GFR-binding peptide
  MOD_RES (4)..(5): Xaa is C or S
PKPXXAPTKLEPLTVLYY

SEQ ID NO: 8329 - protein, 18 aa, Artificial Sequence
  Cyclic GFR-binding peptide
TELEPLPMVYYDENEKVV

SEQ ID NO: 8330 - protein, 21 aa, Artificial Sequence
  Cyclic GFR-binding peptide
  MOD_RES (6)..(7): Xaa is C or S
TVPKPXXAPTQLSPISVLFID

SEQ ID NO: 8331 - protein, 20 aa, Artificial Sequence
  Cyclic GFR-binding peptide
  MOD_RES (6)..(7): Xaa is C or S
ASAAPXXVPQALSPISILFI

SEQ ID NO: 8332 - protein, 25 aa, Artificial Sequence
  Cyclic GFR-binding peptide
  MOD_RES (6)..(7): Xaa is C or S
ASASPXXVSQDLEPLPIVYYIGKTP

SEQ ID NO: 8333 - protein, 21 aa, Artificial Sequence
  Cyclic GFR-binding peptide
  MOD_RES (6)..(7): Xaa is C or S
ASAAPXXVPQALSPISILFIV

SEQ ID NO: 8334 - protein, 23 aa, Artificial Sequence
  Cyclic GFR-binding peptide
  MOD_RES (6)..(7): Xaa is C or S
STPPTXXVPTRLNAISILYFDSA

SEQ ID NO: 8335 - protein, 22 aa, Artificial Sequence
  Cyclic GFR-binding peptide
  MOD_RES (6)..(7): Xaa is C or S
SIPKAXXVPTELEPLTMLYYDE

SEQ ID NO: 8336 - protein, 13 aa, Artificial Sequence
  Cyclic GFR-binding peptide
APTQLEPLTVLYY

SEQ ID NO: 8337 - protein, 18 aa, Artificial Sequence
  Cyclic GFR-binding peptide
TELSPISMLFIDEYDKVV

SEQ ID NO: 8338 - protein, 21 aa, Artificial Sequence
  Cyclic GFR-binding peptide
  MOD_RES (6)..(7): Xaa is C or S
KIPKAXXVPTELEPLPMVYYD

SEQ ID NO: 8339 - protein, 18 aa, Artificial Sequence
  Cyclic GFR-binding peptide
  MOD_RES (4)..(5): Xaa is C or S
PPTXXVPTRLEPLTILYY

SEQ ID NO: 8340 - protein, 18 aa, Artificial Sequence
  Cyclic GFR-binding peptide
  MOD_RES (4)..(5): Xaa is C or S
PKPXXAPTKLEPLPVVYY

SEQ ID NO: 8341 - protein, 13 aa, Artificial Sequence
  Cyclic GFR-binding peptide
VPTRLEPLTILYY

SEQ ID NO: 8342 - protein, 20 aa, Artificial Sequence
  Cyclic GFR-binding peptide
  MOD_RES (6)..(7): Xaa is C or S
ASASPXXVPQDLSPISILFI

SEQ ID NO: 8343 - protein, 17 aa, Artificial Sequence
  Cyclic GFR-binding peptide
  MOD_RES (3)..(4): Xaa is C or S
KPXXAPTKLSPISVLFI

SEQ ID NO: 8344 - protein, 21 aa, Artificial Sequence
  Cyclic GFR-binding peptide
  MOD_RES (6)..(7): Xaa is C or S
SIPKAXXVPTELSPISMLFID

SEQ ID NO: 8345 - protein, 19 aa, Artificial Sequence
  Cyclic GFR-binding peptide
PTELEPLPMVYYDEYDKVV

SEQ ID NO: 8346 - protein, 26 aa, Artificial Sequence
  Cyclic GFR-binding peptide
  MOD_RES (6)..(7): Xaa is C or S
ASASPXXVPQDLEPLPIVYYVGRTPK

SEQ ID NO: 8347 - protein, 27 aa, Artificial Sequence
  Cyclic GFR-binding peptide
  MOD_RES (6)..(7): Xaa is C or S
ASASPXXVSQDLEPLPIVYYIGKTPKI

SEQ ID NO: 8348 - protein, 25 aa, Artificial Sequence
  Cyclic GFR-binding peptide
  MOD_RES (6)..(7): Xaa is C or S
KIPKAXXVPTELSPISMLFIDENEK

SEQ ID NO: 8349 - protein, 16 aa, Artificial Sequence
  Cyclic GFR-binding peptide
  MOD_RES (2)..(3): Xaa is C or S
PXXVPQALEPLTILYY

SEQ ID NO: 8350 - protein, 21 aa, Artificial Sequence
  Cyclic GFR-binding peptide
  MOD_RES (6)..(7): Xaa is C or S
STPPTXXVPTRLEPLPIVYYD

SEQ ID NO: 8351 - protein, 21 aa, Artificial Sequence
  Cyclic GFR-binding peptide
  MOD_RES (6)..(7): Xaa is C or S
ASASPXXVSQDLEPLPIVYYI

SEQ ID NO: 8352 - protein, 17 aa, Artificial Sequence
  Cyclic GFR-binding peptide
QLSPISVLFIDDSSNVI

SEQ ID NO: 8353 - protein, 17 aa, Artificial Sequence
  Cyclic GFR-binding peptide
KLSPISVLFIDDSSNVI

SEQ ID NO: 8354 - protein, 22 aa, Artificial Sequence
  Cyclic GFR-binding peptide
  MOD_RES (6)..(7): Xaa is C or S
SIPKAXXVPTELSPISMLFIDE

SEQ ID NO: 8355 - protein, 27 aa, Artificial Sequence
  Cyclic GFR-binding peptide
  MOD_RES (6)..(7): Xaa is C or S
SIPKAXXVPTELSPISMLFIDEYDKVV

SEQ ID NO: 8356 - protein, 21 aa, Artificial Sequence
  Cyclic GFR-binding peptide
  MOD_RES (6)..(7): Xaa is C or S
STPPTXXVPTRLSAISILYLD

SEQ ID NO: 8357 - protein, 17 aa, Artificial Sequence
  Cyclic GFR-binding peptide
  MOD_RES (3)..(4): Xaa is C or S
KAXXVPTELSPISMLFI

SEQ ID NO: 8358 - protein, 16 aa, Artificial Sequence
  Cyclic GFR-binding peptide
LEPLTMLYYDENEKVV

SEQ ID NO: 8359 - protein, 17 aa, Artificial Sequence
  Cyclic GFR-binding peptide
  MOD_RES (3)..(4): Xaa is C or S
KPXXAPTKLEPLPVVYY

SEQ ID NO: 8360 - protein, 24 aa, Artificial Sequence
  Cyclic GFR-binding peptide
  MOD_RES (7)..(7): Xaa is C or S
HVTKPTXAPTKLEPLPVVYYDDSS

SEQ ID NO: 8361 - protein, 22 aa, Artificial Sequence
  Cyclic GFR-binding peptide
  MOD_RES (6)..(7): Xaa is C or S
YVPKPXXAPTKLEPLPVVYYDD

SEQ ID NO: 8362 - protein, 19 aa, Artificial Sequence
  Cyclic GFR-binding peptide
  MOD_RES (5)..(6): Xaa is C or S
TPPTXXVPTRLEPLTILYY

SEQ ID NO: 8363 - protein, 23 aa, Artificial Sequence
  Cyclic GFR-binding peptide
  MOD_RES (6)..(7): Xaa is C or S
ASAAPXXVPQALSPISILFIVGR

SEQ ID NO: 8364 - protein, 25 aa, Artificial Sequence
  Cyclic GFR-binding peptide
  MOD_RES (6)..(7): Xaa is C or S
ASASPXXVPQDLEPLPIVYYVGRTP

SEQ ID NO: 8365 - protein, 18 aa, Artificial Sequence
  Cyclic GFR-binding peptide
  MOD_RES (4)..(5): Xaa is C or S
PKAXXVPTELSPISMLFI

SEQ ID NO: 8366 - protein, 22 aa, Artificial Sequence
  Cyclic GFR-binding peptide
  MOD_RES (6)..(7): Xaa is C or S
ASAAPXXVPQALSPISILFIVG

SEQ ID NO: 8367 - protein, 18 aa, Artificial Sequence
  Cyclic GFR-binding peptide
  MOD_RES (4)..(5): Xaa is C or S
PPTXXVPTRLNAISILYF

SEQ ID NO: 8368 - protein, 27 aa, Artificial Sequence
  Cyclic GFR-binding peptide
  MOD_RES (6)..(7): Xaa is C or S
YVPKPXXAPTKLEPLPVVYYDDSSNVI

SEQ ID NO: 8369 - protein, 22 aa, Artificial Sequence
  Cyclic GFR-binding peptide
  MOD_RES (7)..(7): Xaa is C or S
HVTKPTXAPTKLEPLTVLYYDD

SEQ ID NO: 8370 - protein, 17 aa, Artificial Sequence
  Cyclic GFR-binding peptide
  MOD_RES (3)..(4): Xaa is C or S
KPXXAPTKLEPLTVLYY

SEQ ID NO: 8371 - protein, 23 aa, Artificial Sequence
  Cyclic GFR-binding peptide
  MOD_RES (6)..(7): Xaa is C or S
KIPKAXXVPTELEPLPMVYYDEN

SEQ ID NO: 8372 - protein, 24 aa, Artificial Sequence
  Cyclic GFR-binding peptide
  MOD_RES (6)..(7): Xaa is C or S
YVPKPXXAPTKLEPLPVVYYDDSS

SEQ ID NO: 8373 - protein, 22 aa, Artificial Sequence
  Cyclic GFR-binding peptide
  MOD_RES (6)..(7): Xaa is C or S
TVPKPXXAPTQLEPLPVVYYDD

SEQ ID NO: 8374 - protein, 20 aa, Artificial Sequence
  Cyclic GFR-binding peptide
  MOD_RES (6)..(7): Xaa is C or S
ASAAPXXVPQALEPLTILYY

SEQ ID NO: 8375 - protein, 14 aa, Artificial Sequence
  Cyclic GFR-binding peptide
  MOD_RES (1)..(1): Xaa is C or S
XVPQDLEPLPIVYY

SEQ ID NO: 8376 - protein, 17 aa, Artificial Sequence
  Cyclic GFR-binding peptide
RLSAISILYLDSANNVV

SEQ ID NO: 8377 - protein, 18 aa, Artificial Sequence
  Cyclic GFR-binding peptide
  MOD_RES (4)..(5): Xaa is C or S
PKPXXAPTQLEPLTVLYY

SEQ ID NO: 8378 - protein, 15 aa, Artificial Sequence
  Cyclic GFR-binding peptide
  MOD_RES (1)..(2): Xaa is C or S
XXVPTELSPISMLFI

SEQ ID NO: 8379 - protein, 22 aa, Artificial Sequence
  Cyclic GFR-binding peptide
  MOD_RES (6)..(7): Xaa is C or S
STPPTXXVPTRLSAISILYLDS

SEQ ID NO: 8380 - protein, 19 aa, Artificial Sequence
  Cyclic GFR-binding peptide
PTELEPLPMVYYDENEKVV

SEQ ID NO: 8381 - protein, 15 aa, Artificial Sequence
  Cyclic GFR-binding peptide
SPISILFIVGRKPKV

SEQ ID NO: 8382 - protein, 17 aa, Artificial Sequence
  Cyclic GFR-binding peptide
  MOD_RES (3)..(4): Xaa is C or S
PTXXVPTRLSAISILYL

SEQ ID NO: 8383 - protein, 19 aa, Artificial Sequence
  Cyclic GFR-binding peptide
  MOD_RES (5)..(6): Xaa is C or S
TPPTXXVPTRLNAISILYF

SEQ ID NO: 8384 - protein, 19 aa, Artificial Sequence
  Cyclic GFR-binding peptide
PTKLEPLTVLYYDDSSNVI

SEQ ID NO: 8385 - protein, 18 aa, Artificial Sequence
  Cyclic GFR-binding peptide
  MOD_RES (4)..(5): Xaa is C or S
AAPXXVPQALEPLTILYY

SEQ ID NO: 8386 - protein, 19 aa, Artificial Sequence
  Cyclic GFR-binding peptide
PTQLEPLTVLYYDDSSNVI

SEQ ID NO: 8387 - protein, 20 aa, Artificial Sequence
  Cyclic GFR-binding peptide
  MOD_RES (6)..(7): Xaa is C or S
STPPTXXVPTRLNAISILYF

SEQ ID NO: 8388 - protein, 13 aa, Artificial Sequence
  Cyclic GFR-binding peptide
VPTRLNAISILYF

SEQ ID NO: 8389 - protein, 27 aa, Artificial Sequence
  Cyclic GFR-binding peptide
  MOD_RES (6)..(7): Xaa is C or S
KIPKAXXVPTELEPLPMVYYDENEKVV

SEQ ID NO: 8390 - protein, 17 aa, Artificial Sequence
  Cyclic GFR-binding peptide
  MOD_RES (3)..(4): Xaa is C or S
SPXXVPQDLSPISILFI

SEQ ID NO: 8391 - protein, 18 aa, Artificial Sequence
  Cyclic GFR-binding peptide
QDLEPLPIVYYIGKTPKI

SEQ ID NO: 8392 - protein, 16 aa, Artificial Sequence
  Cyclic GFR-binding peptide
  MOD_RES (2)..(3): Xaa is C or S
PXXVPQALSPISILFI

SEQ ID NO: 8393 - protein, 25 aa, Artificial Sequence
  Cyclic GFR-binding peptide
  MOD_RES (6)..(7): Xaa is C or S
SIPKAXXVPTELSPISMLFIDEYDK

SEQ ID NO: 8394 - protein, 25 aa, Artificial Sequence
  Cyclic GFR-binding peptide
  MOD_RES (6)..(7): Xaa is C or S
YVPKPXXAPTKLEPLTVLYYDDSSN

SEQ ID NO: 8395 - protein, 26 aa, Artificial Sequence
  Cyclic GFR-binding peptide
  MOD_RES (6)..(7): Xaa is C or S
SIPKAXXVPTELSPISMLFIDEYDKV

SEQ ID NO: 8396 - protein, 24 aa, Artificial Sequence
  Cyclic GFR-binding peptide
  MOD_RES (6)..(7): Xaa is C or S
ASASPXXVSQDLSPISILFIIGKT

SEQ ID NO: 8397 - protein, 19 aa, Artificial Sequence
  Cyclic GFR-binding peptide
PQDLEPLPIVYYVGRTPKV

SEQ ID NO: 8398 - protein, 22 aa, Artificial Sequence
  Cyclic GFR-binding peptide
  MOD_RES (6)..(7): Xaa is C or S
KIPKAXXVPTELSPISMLFIDE

SEQ ID NO: 8399 - protein, 18 aa, Artificial Sequence
  Cyclic GFR-binding peptide
  MOD_RES (5)..(5): Xaa is C or S
TKPTXAPTKLEPLPVVYY

SEQ ID NO: 8400 - protein, 18 aa, Artificial Sequence
  Cyclic GFR-binding peptide
TRLEPLPIVYYDSANNVV

SEQ ID NO: 8401 - protein, 16 aa, Artificial Sequence
  Cyclic GFR-binding peptide
LEPLPMVYYDEYDKVV

SEQ ID NO: 8402 - protein, 15 aa, Artificial Sequence
  Cyclic GFR-binding peptide
  MOD_RES (1)..(2): Xaa is C or S
XXVPQALEPLTILYY

SEQ ID NO: 8403 - protein, 13 aa, Artificial Sequence
  Cyclic GFR-binding peptide
APTKLEPLTVLYY

SEQ ID NO: 8404 - protein, 14 aa, Artificial Sequence
  Cyclic GFR-binding peptide
  MOD_RES (1)..(1): Xaa is C or S
XVPQALEPLTILYY

SEQ ID NO: 8405 - protein, 17 aa, Artificial Sequence
  Cyclic GFR-binding peptide
  MOD_RES (3)..(4): Xaa is C or S
SPXXVSQDLSPISILFI

SEQ ID NO: 8406 - protein, 25 aa, Artificial Sequence
  Cyclic GFR-binding peptide
  MOD_RES (6)..(7): Xaa is C or S
TVPKPXXAPTQLEPLPVVYYDDSSN

SEQ ID NO: 8407 - protein, 26 aa, Artificial Sequence
  Cyclic GFR-binding peptide
  MOD_RES (6)..(7): Xaa is C or S
STPPTXXVPTRLEPLTILYYDSANNV

SEQ ID NO: 8408 - protein, 21 aa, Artificial Sequence
  Cyclic GFR-binding peptide
  MOD_RES (6)..(7): Xaa is C or S
SIPKAXXVPTELEPLTMLYYD

SEQ ID NO: 8409 - protein, 27 aa, Artificial Sequence
  Cyclic GFR-binding peptide
  MOD_RES (6)..(7): Xaa is C or S
STPPTXXVPTRLEPLTILYYDSANNVV

SEQ ID NO: 8410 - protein, 19 aa, Artificial Sequence
  Cyclic GFR-binding peptide
PTRLEPLTILYYDSANNVV

SEQ ID NO: 8411 - protein, 18 aa, Artificial Sequence
  Cyclic GFR-binding peptide
TKLEPLPVVYYDDSSNVI

SEQ ID NO: 8412 - protein, 25 aa, Artificial Sequence
  Cyclic GFR-binding peptide
  MOD_RES (6)..(7): Xaa is C or S
TVPKPXXAPTQLSPISVLFIDDSSN

SEQ ID NO: 8413 - protein, 15 aa, Artificial Sequence
  Cyclic GFR-binding peptide
SPISILFIIGKTPKI

SEQ ID NO: 8414 - protein, 23 aa, Artificial Sequence
  Cyclic GFR-binding peptide
  MOD_RES (6)..(7): Xaa is C or S
STPPTXXVPTRLSAISILYLDSA

SEQ ID NO: 8415 - protein, 18 aa, Artificial Sequence
  Cyclic GFR-binding peptide
  MOD_RES (4)..(5): Xaa is C or S
PKPXXAPTQLEPLPVVYY

SEQ ID NO: 8416 - protein, 16 aa, Artificial Sequence
  Cyclic GFR-binding peptide
LEPLTVLYYDDSSNVI

SEQ ID NO: 8417 - protein, 17 aa, Artificial Sequence
  Cyclic GFR-binding peptide
  MOD_RES (3)..(4): Xaa is C or S
PTXXVPTRLNAISILYF

SEQ ID NO: 8418 - protein, 18 aa, Artificial Sequence
  Cyclic GFR-binding peptide
TQLEPLPVVYYDDSSNVI

SEQ ID NO: 8419 - protein, 24 aa, Artificial Sequence
  Cyclic GFR-binding peptide
  MOD_RES (6)..(7): Xaa is C or S
TVPKPXXAPTQLEPLTVLYYDDSS

SEQ ID NO: 8420 - protein, 13 aa, Artificial Sequence
  Cyclic GFR-binding peptide
APTQLEPLPVVYY

SEQ ID NO: 8421 - protein, 16 aa, Artificial Sequence
  Cyclic GFR-binding peptide
  MOD_RES (2)..(3): Xaa is C or S
PXXVSQDLSPISILFI

SEQ ID NO: 8422 - protein, 21 aa, Artificial Sequence
  Cyclic GFR-binding peptide
  MOD_RES (6)..(7): Xaa is C or S
TVPKPXXAPTQLEPLTVLYYD

SEQ ID NO: 8423 - protein, 16 aa, Artificial Sequence
  Cyclic GFR-binding peptide
  MOD_RES (2)..(3): Xaa is C or S
AXXVPTELEPLPMVYY

SEQ ID NO: 8424 - protein, 18 aa, Artificial Sequence
  Cyclic GFR-binding peptide
  MOD_RES (4)..(5): Xaa is C or S
PPTXXVPTRLSAISILYL

SEQ ID NO: 8425 - protein, 18 aa, Artificial Sequence
  Cyclic GFR-binding peptide
QDLSPISILFIVGRTPKV

SEQ ID NO: 8426 - protein, 14 aa, Artificial Sequence
  Cyclic GFR-binding peptide
  MOD_RES (1)..(1): Xaa is C or S
XVPTELSPISMLFI

SEQ ID NO: 8427 - protein, 14 aa, Artificial Sequence
  Cyclic GFR-binding peptide
  MOD_RES (1)..(1): Xaa is C or S
XVPQALSPISILFI

SEQ ID NO: 8428 - protein, 13 aa, Artificial Sequence
  Cyclic GFR-binding peptide
VPQDLEPLPIVYY

SEQ ID NO: 8429 - protein, 22 aa, Artificial Sequence
  Cyclic GFR-binding peptide
  MOD_RES (6)..(7): Xaa is C or S
TVPKPXXAPTQLEPLTVLYYDD

SEQ ID NO: 8430 - protein, 17 aa, Artificial Sequence
  Cyclic GFR-binding peptide
RLEPLPIVYYDSANNVV

SEQ ID NO: 8431 - protein, 17 aa, Artificial Sequence
  Cyclic GFR-binding peptide
  MOD_RES (3)..(4): Xaa is C or S
KPXXAPTQLEPLTVLYY

SEQ ID NO: 8432 - protein, 18 aa, Artificial Sequence
  Cyclic GFR-binding peptide
  MOD_RES (5)..(5): Xaa is C or S
TKPTXAPTKLEPLTVLYY

SEQ ID NO: 8433 - protein, 16 aa, Artificial Sequence
  Cyclic GFR-binding peptide
  MOD_RES (2)..(3): Xaa is C or S
PXXAPTKLEPLPVVYY

SEQ ID NO: 8434 - protein, 15 aa, Artificial Sequence
  Cyclic GFR-binding peptide
SPISMLFIDEYDKVV

SEQ ID NO: 8435 - protein, 13 aa, Artificial Sequence
  Cyclic GFR-binding peptide
VPTRLSAISILYL

SEQ ID NO: 8436 - protein, 16 aa, Artificial Sequence
  Cyclic GFR-binding peptide
  MOD_RES (3)..(3): Xaa is C or S
PTXAPTKLEPLTVLYY

SEQ ID NO: 8437 - protein, 19 aa, Artificial Sequence
  Cyclic GFR-binding peptide
  MOD_RES (5)..(6): Xaa is C or S
SASPXXVPQDLSPISILFI

SEQ ID NO: 8438 - protein, 20 aa, Artificial Sequence
  Cyclic GFR-binding peptide
  MOD_RES (6)..(7): Xaa is C or S
YVPKPXXAPTKLSPISVLFI

SEQ ID NO: 8439 - protein, 16 aa, Artificial Sequence
  Cyclic GFR-binding peptide
  MOD_RES (2)..(3): Xaa is C or S
AXXVPTELSPISMLFI

SEQ ID NO: 8440 - protein, 13 aa, Artificial Sequence
  Cyclic GFR-binding peptide
VPTELEPLTMLYY

SEQ ID NO: 8441 - protein, 15 aa, Artificial Sequence
  Cyclic GFR-binding peptide
  MOD_RES (1)..(2): Xaa is C or S
XXVPTELEPLTMLYY

SEQ ID NO: 8442 - protein, 24 aa, Artificial Sequence
  Cyclic GFR-binding peptide
  MOD_RES (6)..(7): Xaa is C or S
ASAAPXXVPQALEPLTILYYVGRK

SEQ ID NO: 8443 - protein, 15 aa, Artificial Sequence
  Cyclic GFR-binding peptide
  MOD_RES (1)..(2): Xaa is C or S
XXVSQDLSPISILFI

SEQ ID NO: 8444 - protein, 18 aa, Artificial Sequence
  Cyclic GFR-binding peptide
TKLSPISVLFIDDSSNVI

SEQ ID NO: 8445 - protein, 17 aa, Artificial Sequence
  Cyclic GFR-binding peptide
  MOD_RES (4)..(4): Xaa is C or S
KPTXAPTKLSPISVLFI

SEQ ID NO: 8446 - protein, 17 aa, Artificial Sequence
  Cyclic GFR-binding peptide
  MOD_RES (3)..(4): Xaa is C or S
KPXXAPTQLEPLPVVYY

SEQ ID NO: 8447 - protein, 14 aa, Artificial Sequence
  Cyclic GFR-binding peptide
  MOD_RES (1)..(1): Xaa is C or S
XAPTQLEPLPVVYY

SEQ ID NO: 8448 - protein, 18 aa, Artificial Sequence
  Cyclic GFR-binding peptide
TELEPLTMLYYDENEKVV

SEQ ID NO: 8449 - protein, 17 aa, Artificial Sequence
  Cyclic GFR-binding peptide
  MOD_RES (4)..(4): Xaa is C or S
KPTXAPTKLEPLPVVYY

SEQ ID NO: 8450 - protein, 18 aa, Artificial Sequence
  Cyclic GFR-binding peptide
TQLSPISVLFIDDSSNVI

SEQ ID NO: 8451 - protein, 19 aa, Artificial Sequence
  Cyclic GFR-binding peptide
  MOD_RES (5)..(6): Xaa is C or S
IPKAXXVPTELSPISMLFI

SEQ ID NO: 8452 - protein, 26 aa, Artificial Sequence
  Cyclic GFR-binding peptide
  MOD_RES (6)..(7): Xaa is C or S
TVPKPXXAPTQLEPLPVVYYDDSSNV

SEQ ID NO: 8453 - protein, 19 aa, Artificial Sequence
  Cyclic GFR-binding peptide
  MOD_RES (5)..(6): Xaa is C or S
TPPTXXVPTRLSAISILYL

SEQ ID NO: 8454 - protein, 16 aa, Artificial Sequence
  Cyclic GFR-binding peptide
  MOD_RES (3)..(3): Xaa is C or S
PTXAPTKLEPLPVVYY

SEQ ID NO: 8455 - protein, 17 aa, Artificial Sequence
  Cyclic GFR-binding peptide
  MOD_RES (3)..(4): Xaa is C or S
SPXXVSQDLEPLPIVYY

SEQ ID NO: 8456 - protein, 16 aa, Artificial Sequence
  Cyclic GFR-binding peptide
  MOD_RES (2)..(3): Xaa is C or S
PXXAPTKLEPLTVLYY

SEQ ID NO: 8457 - protein, 25 aa, Artificial Sequence
  Cyclic GFR-binding peptide
  MOD_RES (7)..(7): Xaa is C or S
HVTKPTXAPTKLEPLTVLYYDDSSN

SEQ ID NO: 8458 - protein, 23 aa, Artificial Sequence
  Cyclic GFR-binding peptide
  MOD_RES (6)..(7): Xaa is C or S
TVPKPXXAPTQLEPLPVVYYDDS

SEQ ID NO: 8459 - protein, 15 aa, Artificial Sequence
  Cyclic GFR-binding peptide
EPLPMVYYDENEKVV

SEQ ID NO: 8460 - protein, 19 aa, Artificial Sequence
  Cyclic GFR-binding peptide
  MOD_RES (5)..(6): Xaa is C or S
SAAPXXVPQALSPISILFI

SEQ ID NO: 8461 - protein, 13 aa, Artificial Sequence
  Cyclic GFR-binding peptide
VPQDLSPISILFI

SEQ ID NO: 8462 - protein, 13 aa, Artificial Sequence
  Cyclic GFR-binding peptide
VPTELSPISMLFI

SEQ ID NO: 8463 - protein, 17 aa, Artificial Sequence
  Cyclic GFR-binding peptide
ELSPISMLFIDEYDKVV

SEQ ID NO: 8464 - protein, 16 aa, Artificial Sequence
  Cyclic GFR-binding peptide
  MOD_RES (2)..(3): Xaa is C or S
TXXVPTRLEPLTILYY

SEQ ID NO: 8465 - protein, 26 aa, Artificial Sequence
  Cyclic GFR-binding peptide
  MOD_RES (6)..(7): Xaa is C or S
ASAAPXXVPQALEPLTILYYVGRKPK

SEQ ID NO: 8466 - protein, 21 aa, Artificial Sequence
  Cyclic GFR-binding peptide
  MOD_RES (6)..(7): Xaa is C or S
ASASPXXVSQDLSPISILFII

SEQ ID NO: 8467 - protein, 16 aa, Artificial Sequence
  Cyclic GFR-binding peptide
  MOD_RES (3)..(3): Xaa is C or S
PTXAPTKLSPISVLFI

SEQ ID NO: 8468 - protein, 17 aa, Artificial Sequence
  Cyclic GFR-binding peptide
  MOD_RES (4)..(4): Xaa is C or S
KPTXAPTKLEPLTVLYY

SEQ ID NO: 8469 - protein, 14 aa, Artificial Sequence
  Cyclic GFR-binding peptide
  MOD_RES (1)..(1): Xaa is C or S
XVSQDLSPISILFI

SEQ ID NO: 8470 - protein, 17 aa, Artificial Sequence
  Cyclic GFR-binding peptide
ELEPLPMVYYDENEKVV

SEQ ID NO: 8471 - protein, 18 aa, Artificial Sequence
  Cyclic GFR-binding peptide
QALSPISILFIVGRKPKV

SEQ ID NO: 8472 - protein, 16 aa, Artificial Sequence
  Cyclic GFR-binding peptide
  MOD_RES (2)..(3): Xaa is C or S
AXXVPTELEPLTMLYY

SEQ ID NO: 8473 - protein, 16 aa, Artificial Sequence
  Cyclic GFR-binding peptide
LEPLPIVYYVGRTPKV

SEQ ID NO: 8474 - protein, 25 aa, Artificial Sequence
  Cyclic GFR-binding peptide
  MOD_RES (6)..(7): Xaa is C or S
SIPKAXXVPTELEPLPMVYYDEYDK

SEQ ID NO: 8475 - protein, 14 aa, Artificial Sequence
  Cyclic GFR-binding peptide
  MOD_RES (1)..(1): Xaa is C or S
XAPTQLEPLTVLYY

SEQ ID NO: 8476 - protein, 15 aa, Artificial Sequence
  Cyclic GFR-binding peptide
  MOD_RES (1)..(2): Xaa is C or S
XXVPQDLEPLPIVYY

SEQ ID NO: 8477 - protein, 13 aa, Artificial Sequence
  Cyclic GFR-binding peptide
VSQDLSPISILFI

SEQ ID NO: 8478 - protein, 19 aa, Artificial Sequence
  Cyclic GFR-binding peptide
  MOD_RES (5)..(6): Xaa is C or S
IPKAXXVPTELEPLTMLYY

SEQ ID NO: 8479 - protein, 15 aa, Artificial Sequence
  Cyclic GFR-binding peptide
  MOD_RES (1)..(2): Xaa is C or S
XXVPQALSPISILFI

SEQ ID NO: 8480 - protein, 26 aa, Artificial Sequence
  Cyclic GFR-binding peptide
  MOD_RES (6)..(7): Xaa is C or S
ASASPXXVSQDLSPISILFIIGKTPK

SEQ ID NO: 8481 - protein, 19 aa, Artificial Sequence
  Cyclic GFR-binding peptide
PTELEPLTMLYYDENEKVV

SEQ ID NO: 8482 - protein, 27 aa, Artificial Sequence
  Cyclic GFR-binding peptide
  MOD_RES (6)..(7): Xaa is C or S
ASASPXXVSQDLSPISILFIIGKTPKI

SEQ ID NO: 8483 - protein, 23 aa, Artificial Sequence
  Cyclic GFR-binding peptide
  MOD_RES (6)..(7): Xaa is C or S
KIPKAXXVPTELSPISMLFIDEN

SEQ ID NO: 8484 - protein, 16 aa, Artificial Sequence
  Cyclic GFR-binding peptide
  MOD_RES (2)..(3): Xaa is C or S
PXXAPTKLSPISVLFI

SEQ ID NO: 8485 - protein, 17 aa, Artificial Sequence
  Cyclic GFR-binding peptide
  MOD_RES (3)..(4): Xaa is C or S
APXXVPQALEPLTILYY

SEQ ID NO: 8486 - protein, 19 aa, Artificial Sequence
  Cyclic GFR-binding peptide
  MOD_RES (5)..(6): Xaa is C or S
SASPXXVPQDLEPLPIVYY

SEQ ID NO: 8487 - protein, 27 aa, Artificial Sequence
  Cyclic GFR-binding peptide
  MOD_RES (6)..(7): Xaa is C or S
YVPKPXXAPTKLEPLTVLYYDDSSNVI

SEQ ID NO: 8488 - protein, 19 aa, Artificial Sequence
  Cyclic GFR-binding peptide
PTELSPISMLFIDEYDKVV

SEQ ID NO: 8489 - protein, 26 aa, Artificial Sequence
  Cyclic GFR-binding peptide
  MOD_RES (6)..(7): Xaa is C or S
KIPKAXXVPTELEPLTMLYYDENEKV

SEQ ID NO: 8490 - protein, 14 aa, Artificial Sequence
  Cyclic GFR-binding peptide
  MOD_RES (1)..(1): Xaa is C or S
XAPTQLSPISVLFI

SEQ ID NO: 8491 - protein, 19 aa, Artificial Sequence
  Cyclic GFR-binding peptide
  MOD_RES (5)..(6): Xaa is C or S
VPKPXXAPTQLSPISVLFI

SEQ ID NO: 8492 - protein, 17 aa, Artificial Sequence
  Cyclic GFR-binding peptide
DLSPISILFIIGKTPKI

SEQ ID NO: 8493 - protein, 20 aa, Artificial Sequence
  Cyclic GFR-binding peptide
  MOD_RES (6)..(7): Xaa is C or S
TVPKPXXAPTQLSPISVLFI

SEQ ID NO: 8494 - protein, 14 aa, Artificial Sequence
  Cyclic GFR-binding peptide
  MOD_RES (1)..(1): Xaa is C or S
XVSQDLEPLPIVYY

SEQ ID NO: 8495 - protein, 24 aa, Artificial Sequence
  Cyclic GFR-binding peptide
  MOD_RES (7)..(7): Xaa is C or S
HVTKPTXAPTKLSPISVLFIDDSS

SEQ ID NO: 8496 - protein, 13 aa, Artificial Sequence
  Cyclic GFR-binding peptide
VPTELEPLPMVYY

SEQ ID NO: 8497 - protein, 15 aa, Artificial Sequence
  Cyclic GFR-binding peptide
  MOD_RES (1)..(2): Xaa is C or S
XXVPTELEPLPMVYY

SEQ ID NO: 8498 - protein, 27 aa, Artificial Sequence
  Cyclic GFR-binding peptide
  MOD_RES (7)..(7): Xaa is C or S
HVTKPTXAPTKLSPISVLFIDDSSNVI

SEQ ID NO: 8499 - protein, 23 aa, Artificial Sequence
  Cyclic GFR-binding peptide
  MOD_RES (7)..(7): Xaa is C or S
HVTKPTXAPTKLEPLPVVYYDDS

SEQ ID NO: 8500 - protein, 13 aa, Artificial Sequence
  Cyclic GFR-binding peptide
APTQLSPISVLFI

SEQ ID NO: 8501 - protein, 18 aa, Artificial Sequence
  Cyclic GFR-binding peptide
QDLSPISILFIIGKTPKI

SEQ ID NO: 8502 - protein, 25 aa, Artificial Sequence
  Cyclic GFR-binding peptide
  MOD_RES (6)..(7): Xaa is C or S
ASAAPXXVPQALSPISILFIVGRKP

SEQ ID NO: 8503 - protein, 21 aa, Artificial Sequence
  Cyclic GFR-binding peptide
  MOD_RES (6)..(7): Xaa is C or S
STPPTXXVPTRLNAISILYFD

SEQ ID NO: 8504 - protein, 16 aa, Artificial Sequence
  Cyclic GFR-binding peptide
LEPLPMVYYDENEKVV

SEQ ID NO: 8505 - protein, 16 aa, Artificial Sequence
  Cyclic GFR-binding peptide
LSPISMLFIDEYDKVV

SEQ ID NO: 8506 - protein, 13 aa, Artificial Sequence
  Cyclic GFR-binding peptide
VSQDLEPLPIVYY

SEQ ID NO: 8507 - protein, 26 aa, Artificial Sequence
  Cyclic GFR-binding peptide
  MOD_RES (6)..(7): Xaa is C or S
ASASPXXVPQDLSPISILFIVGRTPK

SEQ ID NO: 8508 - protein, 19 aa, Artificial Sequence
  Cyclic GFR-binding peptide
  MOD_RES (5)..(6): Xaa is C or S
VPKPXXAPTQLEPLTVLYY

SEQ ID NO: 8509 - protein, 14 aa, Artificial Sequence
  Cyclic GFR-binding peptide
  MOD_RES (1)..(1): Xaa is C or S
XVPTELEPLTMLYY

SEQ ID NO: 8510 - protein, 27 aa, Artificial Sequence
  Cyclic GFR-binding peptide
  MOD_RES (6)..(7): Xaa is C or S
ASASPXXVPQDLEPLPIVYYVGRTPKV

SEQ ID NO: 8511 - protein, 20 aa, Artificial Sequence
  Cyclic GFR-binding peptide
  MOD_RES (6)..(7): Xaa is C or S
YVPKPXXAPTKLEPLTVLYY

SEQ ID NO: 8512 - protein, 14 aa, Artificial Sequence
  Cyclic GFR-binding peptide
  MOD_RES (1)..(1): Xaa is C or S
XVPTELEPLPMVYY

SEQ ID NO: 8513 - protein, 25 aa, Artificial Sequence
  Cyclic GFR-binding peptide
  MOD_RES (6)..(7): Xaa is C or S
SIPKAXXVPTELEPLTMLYYDEYDK

SEQ ID NO: 8514 - protein, 17 aa, Artificial Sequence
  Cyclic GFR-binding peptide
  MOD_RES (3)..(4): Xaa is C or S
SPXXVPQDLEPLPIVYY

SEQ ID NO: 8515 - protein, 13 aa, Artificial Sequence
  Cyclic GFR-binding peptide
VPQALSPISILFI

SEQ ID NO: 8516 - protein, 17 aa, Artificial Sequence
  Cyclic GFR-binding peptide
RLNAISILYFDSANNVV

SEQ ID NO: 8517 - protein, 16 aa, Artificial Sequence
  Cyclic GFR-binding peptide
  MOD_RES (2)..(3): Xaa is C or S
TXXVPTRLNAISILYF

SEQ ID NO: 8518 - protein, 17 aa, Artificial Sequence
  Cyclic GFR-binding peptide
ALSPISILFIVGRKPKV

SEQ ID NO: 8519 - protein, 15 aa, Artificial Sequence
  Cyclic GFR-binding peptide
  MOD_RES (1)..(2): Xaa is C or S
XXVSQDLEPLPIVYY

SEQ ID NO: 8520 - protein, 18 aa, Artificial Sequence
  Cyclic GFR-binding peptide
TRLEPLTILYYDSANNVV

SEQ ID NO: 8521 - protein, 20 aa, Artificial Sequence
  Cyclic GFR-binding peptide
  MOD_RES (6)..(7): Xaa is C or S
TVPKPXXAPTQLEPLTVLYY

SEQ ID NO: 8522 - protein, 26 aa, Artificial Sequence
  Cyclic GFR-binding peptide
  MOD_RES (7)..(7): Xaa is C or S
HVTKPTXAPTKLEPLPVVYYDDSSNV

SEQ ID NO: 8523 - protein, 19 aa, Artificial Sequence
  Cyclic GFR-binding peptide
PQDLSPISILFIVGRTPKV

SEQ ID NO: 8524 - protein, 16 aa, Artificial Sequence
  Cyclic GFR-binding peptide
LSPISMLFIDENEKVV

SEQ ID NO: 8525 - protein, 15 aa, Artificial Sequence
  Cyclic GFR-binding peptide
  MOD_RES (1)..(2): Xaa is C or S
XXVPQDLSPISILFI

SEQ ID NO: 8526 - protein, 19 aa, Artificial Sequence
  Cyclic GFR-binding peptide
  MOD_RES (5)..(6): Xaa is C or S
SAAPXXVPQALEPLTILYY

SEQ ID NO: 8527 - protein, 14 aa, Artificial Sequence
  Cyclic GFR-binding peptide
  MOD_RES (1)..(1): Xaa is C or S
XVPQDLSPISILFI

SEQ ID NO: 8528 - protein, 19 aa, Artificial Sequence
  Cyclic GFR-binding peptide
PQALSPISILFIVGRKPKV

SEQ ID NO: 8529 - protein, 22 aa, Artificial Sequence
  Cyclic GFR-binding peptide
  MOD_RES (6)..(7): Xaa is C or S
STPPTXXVPTRLNAISILYFDS

SEQ ID NO: 8530 - protein, 17 aa, Artificial Sequence
  Cyclic GFR-binding peptide
  MOD_RES (3)..(4): Xaa is C or S
PTXXVPTRLEPLTILYY

SEQ ID NO: 8531 - protein, 16 aa, Artificial Sequence
  Cyclic GFR-binding peptide
LEPLTILYYDSANNVV

SEQ ID NO: 8532 - protein, 23 aa, Artificial Sequence
  Cyclic GFR-binding peptide
  MOD_RES (7)..(7): Xaa is C or S
HVTKPTXAPTKLSPISVLFIDDS

SEQ ID NO: 8533 - protein, 24 aa, Artificial Sequence
  Cyclic GFR-binding peptide
  MOD_RES (6)..(7): Xaa is C or S
ASASPXXVSQDLEPLPIVYYIGKT

SEQ ID NO: 8534 - protein, 21 aa, Artificial Sequence
  Cyclic GFR-binding peptide
  MOD_RES (7)..(7): Xaa is C or S
HVTKPTXAPTKLEPLTVLYYD

SEQ ID NO: 8535 - protein, 25 aa, Artificial Sequence
  Cyclic GFR-binding peptide
  MOD_RES (6)..(7): Xaa is C or S
YVPKPXXAPTKLSPISVLFIDDSSN

SEQ ID NO: 8536 - protein, 21 aa, Artificial Sequence
  Cyclic GFR-binding peptide
  MOD_RES (6)..(7): Xaa is C or S
ASASPXXVPQDLSPISILFIV

SEQ ID NO: 8537 - protein, 18 aa, Artificial Sequence
  Cyclic GFR-binding peptide
  MOD_RES (4)..(5): Xaa is C or S
PPTXXVPTRLEPLPIVYY

SEQ ID NO: 8538 - protein, 19 aa, Artificial Sequence
  Cyclic GFR-binding peptide
PTRLEPLPIVYYDSANNVV

SEQ ID NO: 8539 - protein, 15 aa, Artificial Sequence
  Cyclic GFR-binding peptide
  MOD_RES (1)..(2): Xaa is C or S
XXAPTQLSPISVLFI

SEQ ID NO: 8540 - protein, 15 aa, Artificial Sequence
  Cyclic GFR-binding peptide
EPLTMLYYDENEKVV

SEQ ID NO: 8541 - protein, 24 aa, Artificial Sequence
  Cyclic GFR-binding peptide
  MOD_RES (6)..(7): Xaa is C or S
STPPTXXVPTRLEPLTILYYDSAN

SEQ ID NO: 8542 - protein, 23 aa, Artificial Sequence
  Cyclic GFR-binding peptide
  MOD_RES (6)..(7): Xaa is C or S
ASAAPXXVPQALEPLTILYYVGR

SEQ ID NO: 8543 - protein, 25 aa, Artificial Sequence
  Cyclic GFR-binding peptide
  MOD_RES (6)..(7): Xaa is C or S
ASASPXXVSQDLSPISILFIIGKTP

SEQ ID NO: 8544 - protein, 16 aa, Artificial Sequence
  Cyclic GFR-binding peptide
  MOD_RES (2)..(3): Xaa is C or S
TXXVPTRLSAISILYL

SEQ ID NO: 8545 - protein, 18 aa, Artificial Sequence
  Cyclic GFR-binding peptide
  MOD_RES (5)..(5): Xaa is C or S
TKPTXAPTKLSPISVLFI

SEQ ID NO: 8546 - protein, 19 aa, Artificial Sequence
  Cyclic GFR-binding peptide
  MOD_RES (5)..(6): Xaa is C or S
IPKAXXVPTELEPLPMVYY

SEQ ID NO: 8547 - protein, 24 aa, Artificial Sequence
  Cyclic GFR-binding peptide
  MOD_RES (6)..(7): Xaa is C or S
SIPKAXXVPTELEPLTMLYYDEYD

SEQ ID NO: 8548 - protein, 16 aa, Artificial Sequence
  Cyclic GFR-binding peptide
LEPLTILYYVGRKPKV

SEQ ID NO: 8549 - protein, 17 aa, Artificial Sequence
  Cyclic GFR-binding peptide
DLSPISILFIVGRTPKV

SEQ ID NO: 8550 - protein, 19 aa, Artificial Sequence
  Cyclic GFR-binding peptide
  MOD_RES (5)..(6): Xaa is C or S
SASPXXVSQDLEPLPIVYY

SEQ ID NO: 8551 - protein, 18 aa, Artificial Sequence
  Cyclic GFR-binding peptide
TELEPLPMVYYDEYDKVV

SEQ ID NO: 8552 - protein, 27 aa, Artificial Sequence
  Cyclic GFR-binding peptide
  MOD_RES (6)..(7): Xaa is C or S
TVPKPXXAPTQLEPLTVLYYDDSSNVI

SEQ ID NO: 8553 - protein, 17 aa, Artificial Sequence
  Cyclic GFR-binding peptide
  MOD_RES (3)..(4): Xaa is C or S
KPXXAPTQLSPISVLFI

SEQ ID NO: 8554 - protein, 20 aa, Artificial Sequence
  Cyclic GFR-binding peptide
  MOD_RES (6)..(7): Xaa is C or S
YVPKPXXAPTKLEPLPVVYY

SEQ ID NO: 8555 - protein, 27 aa, Artificial Sequence
  Cyclic GFR-binding peptide
  MOD_RES (6)..(7): Xaa is C or S
KIPKAXXVPTELSPISMLFIDENEKVV

SEQ ID NO: 8556 - protein, 27 aa, Artificial Sequence
  Cyclic GFR-binding peptide
  MOD_RES (6)..(7): Xaa is C or S
STPPTXXVPTRLNAISILYFDSANNVV

SEQ ID NO: 8557 - protein, 26 aa, Artificial Sequence
  Cyclic GFR-binding peptide
  MOD_RES (6)..(7): Xaa is C or S
ASASPXXVSQDLEPLPIVYYIGKTPK

SEQ ID NO: 8558 - protein, 20 aa, Artificial Sequence
  Cyclic GFR-binding peptide
  MOD_RES (6)..(7): Xaa is C or S
STPPTXXVPTRLEPLTILYY

SEQ ID NO: 8559 - protein, 24 aa, Artificial Sequence
  Cyclic GFR-binding peptide
  MOD_RES (6)..(7): Xaa is C or S
KIPKAXXVPTELSPISMLFIDENE

SEQ ID NO: 8560 - protein, 25 aa, Artificial Sequence
  Cyclic GFR-binding peptide
  MOD_RES (6)..(7): Xaa is C or S
STPPTXXVPTRLEPLTILYYDSANN

SEQ ID NO: 8561 - protein, 22 aa, Artificial Sequence
  Cyclic GFR-binding peptide
  MOD_RES (6)..(7): Xaa is C or S
ASASPXXVSQDLSPISILFIIG

SEQ ID NO: 8562 - protein, 23 aa, Artificial Sequence
  Cyclic GFR-binding peptide
  MOD_RES (6)..(7): Xaa is C or S
KIPKAXXVPTELEPLTMLYYDEN

SEQ ID NO: 8563 - protein, 26 aa, Artificial Sequence
  Cyclic GFR-binding peptide
  MOD_RES (6)..(7): Xaa is C or S
STPPTXXVPTRLNAISILYFDSANNV

SEQ ID NO: 8564 - protein, 18 aa, Artificial Sequence
  Cyclic GFR-binding peptide
  MOD_RES (4)..(5): Xaa is C or S
PKAXXVPTELEPLPMVYY

SEQ ID NO: 8565 - protein, 23 aa, Artificial Sequence
  Cyclic GFR-binding peptide
  MOD_RES (6)..(7): Xaa is C or S
SIPKAXXVPTELSPISMLFIDEY

SEQ ID NO: 8566 - protein, 21 aa, Artificial Sequence
  Cyclic GFR-binding peptide
  MOD_RES (6)..(7): Xaa is C or S
KIPKAXXVPTELEPLTMLYYD

SEQ ID NO: 8567 - protein, 18 aa, Artificial Sequence
  Cyclic GFR-binding peptide
  MOD_RES (4)..(5): Xaa is C or S
ASPXXVSQDLEPLPIVYY

SEQ ID NO: 8568 - protein, 17 aa, Artificial Sequence
  Cyclic GFR-binding peptide
ELEPLTMLYYDENEKVV

SEQ ID NO: 8569 - protein, 23 aa, Artificial Sequence
  Cyclic GFR-binding peptide
  MOD_RES (7)..(7): Xaa is C or S
HVTKPTXAPTKLEPLTVLYYDDS

SEQ ID NO: 8570 - protein, 27 aa, Artificial Sequence
  Cyclic GFR-binding peptide
  MOD_RES (6)..(7): Xaa is C or S
STPPTXXVPTRLSAISILYLDSANNVV

SEQ ID NO: 8571 - protein, 15 aa, Artificial Sequence
  Cyclic GFR-binding peptide
SPISVLFIDDSSNVI

SEQ ID NO: 8572 - protein, 23 aa, Artificial Sequence
  Cyclic GFR-binding peptide
  MOD_RES (6)..(7): Xaa is C or S
STPPTXXVPTRLEPLTILYYDSA

SEQ ID NO: 8573 - protein, 13 aa, Artificial Sequence
  Cyclic GFR-binding peptide
VPQALEPLTILYY

SEQ ID NO: 8574 - protein, 17 aa, Artificial Sequence
  Cyclic GFR-binding peptide
  MOD_RES (3)..(4): Xaa is C or S
PTXXVPTRLEPLPIVYY

SEQ ID NO: 8575 - protein, 15 aa, Artificial Sequence
  Cyclic GFR-binding peptide
EPLPIVYYVGRTPKV

SEQ ID NO: 8576 - protein, 15 aa, Artificial Sequence
  Cyclic GFR-binding peptide
EPLPMVYYDEYDKVV

SEQ ID NO: 8577 - protein, 26 aa, Artificial Sequence
  Cyclic GFR-binding peptide
  MOD_RES (6)..(7): Xaa is C or S
KIPKAXXVPTELSPISMLFIDENEKV

SEQ ID NO: 8578 - protein, 16 aa, Artificial Sequence
  Cyclic GFR-binding peptide
LEPLPIVYYDSANNVV

SEQ ID NO: 8579 - protein, 15 aa, Artificial Sequence
  Cyclic GFR-binding peptide
EPLTVLYYDDSSNVI

SEQ ID NO: 8580 - protein, 19 aa, Artificial Sequence
  Cyclic GFR-binding peptide
PTRLSAISILYLDSANNVV

SEQ ID NO: 8581 - protein, 24 aa, Artificial Sequence
  Cyclic GFR-binding peptide
  MOD_RES (6)..(7): Xaa is C or S
SIPKAXXVPTELEPLPMVYYDEYD

SEQ ID NO: 8582 - protein, 18 aa, Artificial Sequence
  Cyclic GFR-binding peptide
  MOD_RES (4)..(5): Xaa is C or S
PKAXXVPTELEPLTMLYY

SEQ ID NO: 8583 - protein, 17 aa, Artificial Sequence
  Cyclic GFR-binding peptide
  MOD_RES (3)..(4): Xaa is C or S
APXXVPQALSPISILFI

SEQ ID NO: 8584 - protein, 20 aa, Artificial Sequence
  Cyclic GFR-binding peptide
  MOD_RES (6)..(7): Xaa is C or S
ASASPXXVPQDLEPLPIVYY

SEQ ID NO: 8585 - protein, 14 aa, Artificial Sequence
  Cyclic GFR-binding peptide
  MOD_RES (1)..(1): Xaa is C or S
XVPTRLNAISILYF

SEQ ID NO: 8586 - protein, 26 aa, Artificial Sequence
  Cyclic GFR-binding peptide
  MOD_RES (6)..(7): Xaa is C or S
SIPKAXXVPTELEPLPMVYYDEYDKV

SEQ ID NO: 8587 - protein, 24 aa, Artificial Sequence
  Cyclic GFR-binding peptide
  MOD_RES (6)..(7): Xaa is C or S
ASASPXXVPQDLSPISILFIVGRT

SEQ ID NO: 8588 - protein, 14 aa, Artificial Sequence
  Cyclic GFR-binding peptide
  MOD_RES (1)..(1): Xaa is C or S
XVPTRLSAISILYL

SEQ ID NO: 8589 - protein, 19 aa, Artificial Sequence
  Cyclic GFR-binding peptide
PTKLSPISVLFIDDSSNVI

SEQ ID NO: 8590 - protein, 21 aa, Artificial Sequence
  Cyclic GFR-binding peptide
  MOD_RES (6)..(7): Xaa is C or S
ASAAPXXVPQALEPLTILYYV

SEQ ID NO: 8591 - protein, 20 aa, Artificial Sequence
  Cyclic GFR-binding peptide
  MOD_RES (6)..(7): Xaa is C or S
STPPTXXVPTRLEPLPIVYY

SEQ ID NO: 8592 - protein, 23 aa, Artificial Sequence
  Cyclic GFR-binding peptide
  MOD_RES (6)..(7): Xaa is C or S
TVPKPXXAPTQLEPLTVLYYDDS

SEQ ID NO: 8593 - protein, 26 aa, Artificial Sequence
  Cyclic GFR-binding peptide
  MOD_RES (6)..(7): Xaa is C or S
SIPKAXXVPTELEPLTMLYYDEYDKV

SEQ ID NO: 8594 - protein, 19 aa, Artificial Sequence
  Cyclic GFR-binding peptide
PTQLSPISVLFIDDSSNVI

SEQ ID NO: 8595 - protein, 24 aa, Artificial Sequence
  Cyclic GFR-binding peptide
  MOD_RES (6)..(7): Xaa is C or S
KIPKAXXVPTELEPLTMLYYDENE

SEQ ID NO: 8596 - protein, 21 aa, Artificial Sequence
  Cyclic GFR-binding peptide
  MOD_RES (6)..(7): Xaa is C or S
YVPKPXXAPTKLSPISVLFID

SEQ ID NO: 8597 - protein, 15 aa, Artificial Sequence
  Cyclic GFR-binding peptide
SPISMLFIDENEKVV

SEQ ID NO: 8598 - protein, 23 aa, Artificial Sequence
  Cyclic GFR-binding peptide
  MOD_RES (6)..(7): Xaa is C or S
YVPKPXXAPTKLEPLTVLYYDDS

SEQ ID NO: 8599 - protein, 26 aa, Artificial Sequence
  Cyclic GFR-binding peptide
  MOD_RES (6)..(7): Xaa is C or S
STPPTXXVPTRLSAISILYLDSANNV

SEQ ID NO: 8600 - protein, 17 aa, Artificial Sequence
  Cyclic GFR-binding peptide
  MOD_RES (3)..(4): Xaa is C or S
KAXXVPTELEPLPMVYY

SEQ ID NO: 8601 - protein, 26 aa, Artificial Sequence
  Cyclic GFR-binding peptide
  MOD_RES (6)..(7): Xaa is C or S
TVPKPXXAPTQLSPISVLFIDDSSNV

SEQ ID NO: 8602 - protein, 15 aa, Artificial Sequence
  Cyclic GFR-binding peptide
  MOD_RES (1)..(2): Xaa is C or S
XXAPTQLEPLPVVYY

SEQ ID NO: 8603 - protein, 27 aa, Artificial Sequence
  Cyclic GFR-binding peptide
  MOD_RES (6)..(7): Xaa is C or S
ASAAPXXVPQALEPLTILYYVGRKPKV

SEQ ID NO: 8604 - protein, 19 aa, Artificial Sequence
  Cyclic GFR-binding peptide
  MOD_RES (5)..(6): Xaa is C or S
SASPXXVSQDLSPISILFI

SEQ ID NO: 8605 - protein, 16 aa, Artificial Sequence
  Cyclic GFR-binding peptide
LSPISILFIVGRTPKV

SEQ ID NO: 8606 - protein, 27 aa, Artificial Sequence
  Cyclic GFR-binding peptide
  MOD_RES (6)..(7): Xaa is C or S
TVPKPXXAPTQLEPLPVVYYDDSSNVI

SEQ ID NO: 8607 - protein, 20 aa, Artificial Sequence
  Cyclic GFR-binding peptide
  MOD_RES (6)..(7): Xaa is C or S
TVPKPXXAPTQLEPLPVVYY

SEQ ID NO: 8608 - protein, 16 aa, Artificial Sequence
  Cyclic GFR-binding peptide
  MOD_RES (2)..(3): Xaa is C or S
PXXAPTQLEPLPVVYY

SEQ ID NO: 8609 - protein, 25 aa, Artificial Sequence
  Cyclic GFR-binding peptide
  MOD_RES (6)..(7): Xaa is C or S
ASAAPXXVPQALEPLTILYYVGRKP

SEQ ID NO: 8610 - protein, 16 aa, Artificial Sequence
  Cyclic GFR-binding peptide
LSPISVLFIDDSSNVI

SEQ ID NO: 8611 - protein, 21 aa, Artificial Sequence
  Cyclic GFR-binding peptide
  MOD_RES (6)..(7): Xaa is C or S
YVPKPXXAPTKLEPLTVLYYD

SEQ ID NO: 8612 - protein, 17 aa, Artificial Sequence
  Cyclic GFR-binding peptide
ALEPLTILYYVGRKPKV

SEQ ID NO: 8613 - protein, 26 aa, Artificial Sequence
  Cyclic GFR-binding peptide
  MOD_RES (6)..(7): Xaa is C or S
YVPKPXXAPTKLEPLPVVYYDDSSNV

SEQ ID NO: 8614 - protein, 22 aa, Artificial Sequence
  Cyclic GFR-binding peptide
  MOD_RES (6)..(7): Xaa is C or S
SIPKAXXVPTELEPLPMVYYDE

SEQ ID NO: 8615 - protein, 24 aa, Artificial Sequence
  Cyclic GFR-binding peptide
  MOD_RES (6)..(7): Xaa is C or S
TVPKPXXAPTQLEPLPVVYYDDSS

SEQ ID NO: 8616 - protein, 19 aa, Artificial Sequence
  Cyclic GFR-binding peptide
  MOD_RES (5)..(6): Xaa is C or S
VPKPXXAPTQLEPLPVVYY

SEQ ID NO: 8617 - protein, 27 aa, Artificial Sequence
  Cyclic GFR-binding peptide
  MOD_RES (6)..(7): Xaa is C or S
ASASPXXVPQDLSPISILFIVGRTPKV

SEQ ID NO: 8618 - protein, 15 aa, Artificial Sequence
  Cyclic GFR-binding peptide
  MOD_RES (1)..(2): Xaa is C or S
XXAPTQLEPLTVLYY

SEQ ID NO: 8619 - protein, 26 aa, Artificial Sequence
  Cyclic GFR-binding peptide
  MOD_RES (7)..(7): Xaa is C or S
HVTKPTXAPTKLEPLTVLYYDDSSNV

SEQ ID NO: 8620 - protein, 15 aa, Artificial Sequence
  Cyclic GFR-binding peptide
EPLTILYYVGRKPKV

SEQ ID NO: 8621 - protein, 18 aa, Artificial Sequence
  Cyclic GFR-binding peptide
  MOD_RES (4)..(5): Xaa is C or S
ASPXXVPQDLEPLPIVYY

SEQ ID NO: 8622 - protein, 21 aa, Artificial Sequence
  Cyclic GFR-binding peptide
  MOD_RES (6)..(7): Xaa is C or S
STPPTXXVPTRLEPLTILYYD

SEQ ID NO: 8623 - protein, 24 aa, Artificial Sequence
  Cyclic GFR-binding peptide
  MOD_RES (6)..(7): Xaa is C or S
SIPKAXXVPTELSPISMLFIDEYD

SEQ ID NO: 8624 - protein, 15 aa, Artificial Sequence
  Cyclic GFR-binding peptide
  MOD_RES (1)..(2): Xaa is C or S
XXVPTRLSAISILYL

SEQ ID NO: 8625 - protein, 21 aa, Artificial Sequence
  Cyclic GFR-binding peptide
  MOD_RES (7)..(7): Xaa is C or S
HVTKPTXAPTKLSPISVLFID

SEQ ID NO: 8626 - protein, 17 aa, Artificial Sequence
  Cyclic GFR-binding peptide
RLEPLTILYYDSANNVV

SEQ ID NO: 8627 - protein, 24 aa, Artificial Sequence
  Cyclic GFR-binding peptide
  MOD_RES (6)..(7): Xaa is C or S
YVPKPXXAPTKLEPLTVLYYDDSS

SEQ ID NO: 8628 - protein, 15 aa, Artificial Sequence
  Cyclic GFR-binding peptide
  MOD_RES (1)..(2): Xaa is C or S
XXVPTRLNAISILYF

SEQ ID NO: 8629 - protein, 22 aa, Artificial Sequence
  Cyclic GFR-binding peptide
  MOD_RES (6)..(7): Xaa is C or S
STPPTXXVPTRLEPLTILYYDS

SEQ ID NO: 8630 - protein, 25 aa, Artificial Sequence
  Cyclic GFR-binding peptide
  MOD_RES (7)..(7): Xaa is C or S
HVTKPTXAPTKLEPLPVVYYDDSSN

SEQ ID NO: 8631 - protein, 15 aa, Artificial Sequence
  Cyclic GFR-binding peptide
EPLPVVYYDDSSNVI

SEQ ID NO: 8632 - protein, 20 aa, Artificial Sequence
  Cyclic GFR-binding peptide
  MOD_RES (6)..(7): Xaa is C or S
KIPKAXXVPTELEPLPMVYY

SEQ ID NO: 8633 - protein, 27 aa, Artificial Sequence
  Cyclic GFR-binding peptide
  MOD_RES (7)..(7): Xaa is C or S
HVTKPTXAPTKLEPLTVLYYDDSSNVI

SEQ ID NO: 8634 - protein, 21 aa, Artificial Sequence
  Cyclic GFR-binding peptide
  MOD_RES (7)..(7): Xaa is C or S
HVTKPTXAPTKLEPLPVVYYD

SEQ ID NO: 8635 - protein, 23 aa, Artificial Sequence
  Cyclic GFR-binding peptide
  MOD_RES (6)..(7): Xaa is C or S
YVPKPXXAPTKLSPISVLFIDDS

SEQ ID NO: 8636 - protein, 16 aa, Artificial Sequence
  Cyclic GFR-binding peptide
LNAISILYFDSANNVV

SEQ ID NO: 8637 - protein, 16 aa, Artificial Sequence
  Cyclic GFR-binding peptide
LEPLPIVYYIGKTPKI

SEQ ID NO: 8638 - protein, 15 aa, Artificial Sequence
  Cyclic GFR-binding peptide
  MOD_RES (1)..(2): Xaa is C or S
XXAPTKLEPLTVLYY

SEQ ID NO: 8639 - protein, 25 aa, Artificial Sequence
  Cyclic GFR-binding peptide
  MOD_RES (7)..(7): Xaa is C or S
HVTKPTXAPTKLSPISVLFIDDSSN

SEQ ID NO: 8640 - protein, 20 aa, Artificial Sequence
  Cyclic GFR-binding peptide
  MOD_RES (7)..(7): Xaa is C or S
HVTKPTXAPTKLEPLTVLYY

SEQ ID NO: 8641 - protein, 26 aa, Artificial Sequence
  Cyclic GFR-binding peptide
  MOD_RES (6)..(7): Xaa is C or S
ASAAPXXVPQALSPISILFIVGRKPK

SEQ ID NO: 8642 - protein, 14 aa, Artificial Sequence
  Cyclic GFR-binding peptide
  MOD_RES (1)..(1): Xaa is C or S
XAPTKLEPLPVVYY

SEQ ID NO: 8643 - protein, 18 aa, Artificial Sequence
  Cyclic GFR-binding peptide
TELEPLTMLYYDEYDKVV

SEQ ID NO: 8644 - protein, 16 aa, Artificial Sequence
  Cyclic GFR-binding peptide
  MOD_RES (2)..(3): Xaa is C or S
TXXVPTRLEPLPIVYY

SEQ ID NO: 8645 - protein, 15 aa, Artificial Sequence
  Cyclic GFR-binding peptide
EPLTILYYDSANNVV

SEQ ID NO: 8646 - protein, 16 aa, Artificial Sequence
  Cyclic GFR-binding peptide
  MOD_RES (2)..(3): Xaa is C or S
PXXAPTQLEPLTVLYY

SEQ ID NO: 8647 - protein, 17 aa, Artificial Sequence
  Cyclic GFR-binding peptide
KLEPLTVLYYDDSSNVI

SEQ ID NO: 8648 - protein, 17 aa, Artificial Sequence
  Cyclic GFR-binding peptide
ELEPLPMVYYDEYDKVV

SEQ ID NO: 8649 - protein, 19 aa, Artificial Sequence
  Cyclic GFR-binding peptide
  MOD_RES (6)..(6): Xaa is C or S
VTKPTXAPTKLEPLPVVYY

SEQ ID NO: 8650 - protein, 25 aa, Artificial Sequence
  Cyclic GFR-binding peptide
  MOD_RES (6)..(7): Xaa is C or S
STPPTXXVPTRLEPLPIVYYDSANN

SEQ ID NO: 8651 - protein, 23 aa, Artificial Sequence
  Cyclic GFR-binding peptide
  MOD_RES (6)..(7): Xaa is C or S
TVPKPXXAPTQLSPISVLFIDDS

SEQ ID NO: 8652 - protein, 17 aa, Artificial Sequence
  Cyclic GFR-binding peptide
QLEPLTVLYYDDSSNVI

SEQ ID NO: 8653 - protein, 27 aa, Artificial Sequence
  Cyclic GFR-binding peptide
  MOD_RES (6)..(7): Xaa is C or S
SIPKAXXVPTELEPLTMLYYDEYDKVV

SEQ ID NO: 8654 - protein, 22 aa, Artificial Sequence
  Cyclic GFR-binding peptide
  MOD_RES (6)..(7): Xaa is C or S
TVPKPXXAPTQLSPISVLFIDD

SEQ ID NO: 8655 - protein, 22 aa, Artificial Sequence
  Cyclic GFR-binding peptide
  MOD_RES (6)..(7): Xaa is C or S
ASASPXXVPQDLSPISILFIVG

SEQ ID NO: 8656 - protein, 22 aa, Artificial Sequence
  Cyclic GFR-binding peptide
  MOD_RES (6)..(7): Xaa is C or S
YVPKPXXAPTKLSPISVLFIDD

SEQ ID NO: 8657 - protein, 28 aa, Artificial Sequence
  Cyclic GFR-binding peptide
  MOD_RES (24)..(24): Xaa is C or S
KPKKRVYEIKRVQVPRHHVRSPQXKVSS

SEQ ID NO: 8658 - protein, 13 aa, Artificial Sequence
  Cyclic GFR-binding peptide
VKAVKVSRLQVQT

SEQ ID NO: 8659 - protein, 13 aa, Artificial Sequence
  Cyclic GFR-binding peptide
IKRMQVPRQGTPV

SEQ ID NO: 8660 - protein, 23 aa, Artificial Sequence
  Cyclic GFR-binding peptide
  MOD_RES (19)..(19): Xaa is C or S
VIEMIQVTINSLQVQTPRXQVNR

SEQ ID NO: 8661 - protein, 19 aa, Artificial Sequence
  Cyclic GFR-binding peptide
  MOD_RES (14)..(14): Xaa is C or S
IKRMQVPRQGTPVXELGED

SEQ ID NO: 8662 - protein, 18 aa, Artificial Sequence
  Cyclic GFR-binding peptide
HQGQHPKIRIKRMQVPRE

SEQ ID NO: 8663 - protein, 25 aa, Artificial Sequence
  Cyclic GFR-binding peptide
  MOD_RES (19)..(19): Xaa is C or S
HPKIRVKAMKVSRQGTPVXELGEDN

SEQ ID NO: 8664 - protein, 28 aa, Artificial Sequence
  Cyclic GFR-binding peptide
  MOD_RES (24)..(24): Xaa is C or S
KPKKRVYEMIQVTINSHHVRSPQXKVSS

SEQ ID NO: 8665 - protein, 16 aa, Artificial Sequence
  Cyclic GFR-binding peptide
  MOD_RES (14)..(14): Xaa is C or S
VKAMKVSRQGTPVXEL

SEQ ID NO: 8666 - protein, 29 aa, Artificial Sequence
  Cyclic GFR-binding peptide
  MOD_RES (23)..(23): Xaa is C or S
HQGQHPKIRVKAMKVSREETPVXELGEDN

SEQ ID NO: 8667 - protein, 19 aa, Artificial Sequence
  Cyclic GFR-binding peptide
HQGQHPKIRIKRMQVPREE

SEQ ID NO: 8668 - protein, 22 aa, Artificial Sequence
  Cyclic GFR-binding peptide
  MOD_RES (18)..(18): Xaa is C or S
YEIKRVQVPRHHVRSPQXKVSS

SEQ ID NO: 8669 - protein, 13 aa, Artificial Sequence
  Cyclic GFR-binding peptide
MIQVTINSLQVQT

SEQ ID NO: 8670 - protein, 19 aa, Artificial Sequence
  Cyclic GFR-binding peptide
  MOD_RES (14)..(14): Xaa is C or S
VKAMKVSREETPVXELGED

SEQ ID NO: 8671 - protein, 17 aa, Artificial Sequence
  Cyclic GFR-binding peptide
LKPKKRVYEIKRVQVPR

SEQ ID NO: 8672 - protein, 13 aa, Artificial Sequence
  Cyclic GFR-binding peptide
VKAMKVSREETPV

SEQ ID NO: 8673 - protein, 28 aa, Artificial Sequence
  Cyclic GFR-binding peptide
  MOD_RES (22)..(22): Xaa is C or S
QGQHPKIRIKRMQVPREETPVXELGEDN

SEQ ID NO: 8674 - protein, 21 aa, Artificial Sequence
  Cyclic GFR-binding peptide
LKPKKRVYEIKRVQVPRHHVR

SEQ ID NO: 8675 - protein, 16 aa, Artificial Sequence
  Cyclic GFR-binding peptide
  MOD_RES (16)..(16): Xaa is C or S
MIQVTINSLQVQTPRX

SEQ ID NO: 8676 - protein, 14 aa, Artificial Sequence
  Cyclic GFR-binding peptide
MIQVTINSHHVRSP

SEQ ID NO: 8677 - protein, 20 aa, Artificial Sequence
  Cyclic GFR-binding peptide
LKPKKRVYEIKRVQVPRHHV

SEQ ID NO: 8678 - protein, 20 aa, Artificial Sequence
  Cyclic GFR-binding peptide
HQGQHPKIRVKAMKVSRQGT

SEQ ID NO: 8679 - protein, 22 aa, Artificial Sequence
  Cyclic GFR-binding peptide
  MOD_RES (18)..(18): Xaa is C or S
IEMIQVTINSLQVQTPRXQVNR

SEQ ID NO: 8680 - protein, 17 aa, Artificial Sequence
  Cyclic GFR-binding peptide
HQGQHPKIRVKAMKVSR

SEQ ID NO: 8681 - protein, 15 aa, Artificial Sequence
  Cyclic GFR-binding peptide
  MOD_RES (14)..(14): Xaa is C or S
VKAMKVSRQGTPVXE

SEQ ID NO: 8682 - protein, 21 aa, Artificial Sequence
  Cyclic GFR-binding peptide
HQGQHPKIRVKAMKVSRQGTP

SEQ ID NO: 8683 - protein, 28 aa, Artificial Sequence
  Cyclic GFR-binding peptide
  MOD_RES (22)..(22): Xaa is C or S
QGQHPKIRVKAMKVSRQGTPVXELGEDN

SEQ ID NO: 8684 - protein, 20 aa, Artificial Sequence
  Cyclic GFR-binding peptide
  MOD_RES (16)..(16): Xaa is C or S
IKRVQVPRHHVRSPQXKVSS

SEQ ID NO: 8685 - protein, 20 aa, Artificial Sequence
  Cyclic GFR-binding peptide
HQGQHPKIRIKRMQVPREET

SEQ ID NO: 8686 - protein, 15 aa, Artificial Sequence
  Cyclic GFR-binding peptide
  MOD_RES (14)..(14): Xaa is C or S
VKAMKVSREETPVXE

SEQ ID NO: 8687 - protein, 28 aa, Artificial Sequence
  Cyclic GFR-binding peptide
  MOD_RES (24)..(24): Xaa is C or S
IPKKRVIEVKAVKVSRLQVQTPRXQVNR

SEQ ID NO: 8688 - protein, 14 aa, Artificial Sequence
  Cyclic GFR-binding peptide
  MOD_RES (14)..(14): Xaa is C or S
IKRMQVPREETPVX

SEQ ID NO: 8689 - protein, 27 aa, Artificial Sequence
  Cyclic GFR-binding peptide
  MOD_RES (23)..(23): Xaa is C or S
PKKRVYEMIQVTINSHHVRSPQXKVSS

SEQ ID NO: 8690 - protein, 19 aa, Artificial Sequence
  Cyclic GFR-binding peptide
FIPKKRVIEMIQVTINSLQ

SEQ ID NO: 8691 - protein, 26 aa, Artificial Sequence
  Cyclic GFR-binding peptide
  MOD_RES (20)..(20): Xaa is C or S
QHPKIRVKAMKVSREETPVXELGEDN

SEQ ID NO: 8692 - protein, 15 aa, Artificial Sequence
  Cyclic GFR-binding peptide
MIQVTINSHHVRSPQ

SEQ ID NO: 8693 - protein, 21 aa, Artificial Sequence
  Cyclic GFR-binding peptide
  MOD_RES (17)..(17): Xaa is C or S
EVKAVKVSRLQVQTPRXQVNR

SEQ ID NO: 8694 - protein, 19 aa, Artificial Sequence
  Cyclic GFR-binding peptide
  MOD_RES (16)..(16): Xaa is C or S
VKAVKVSRLQVQTPRXQVN

SEQ ID NO: 8695 - protein, 21 aa, Artificial Sequence
  Cyclic GFR-binding peptide
HQGQHPKIRIKRMQVPRQGTP

SEQ ID NO: 8696 - protein, 29 aa, Artificial Sequence
  Cyclic GFR-binding peptide
  MOD_RES (25)..(25): Xaa is C or S
FIPKKRVIEMIQVTINSLQVQTPRXQVNR

SEQ ID NO: 8697 - protein, 16 aa, Artificial Sequence
  Cyclic GFR-binding peptide
  MOD_RES (14)..(14): Xaa is C or S
IKRMQVPRQGTPVXEL

SEQ ID NO: 8698 - protein, 14 aa, Artificial Sequence
  Cyclic GFR-binding peptide
MIQVTINSLQVQTP

SEQ ID NO: 8699 - protein, 21 aa, Artificial Sequence
  Cyclic GFR-binding peptide
HQGQHPKIRVKAMKVSREETP

SEQ ID NO: 8700 - protein, 22 aa, Artificial Sequence
  Cyclic GFR-binding peptide
  MOD_RES (18)..(18): Xaa is C or S
YEMIQVTINSHHVRSPQXKVSS

SEQ ID NO: 8701 - protein, 27 aa, Artificial Sequence
  Cyclic GFR-binding peptide
  MOD_RES (23)..(23): Xaa is C or S
PKKRVYEIKRVQVPRHHVRSPQXKVSS

SEQ ID NO: 8702 - protein, 21 aa, Artificial Sequence
  Cyclic GFR-binding peptide
  MOD_RES (17)..(17): Xaa is C or S
EMIQVTINSLQVQTPRXQVNR

SEQ ID NO: 8703 - protein, 13 aa, Artificial Sequence
  Cyclic GFR-binding peptide
VKAMKVSRQGTPV

SEQ ID NO: 8704 - protein, 21 aa, Artificial Sequence
  Cyclic GFR-binding peptide
  MOD_RES (15)..(15): Xaa is C or S
RIKRMQVPRQGTPVXELGEDN

SEQ ID NO: 8705 - protein, 18 aa, Artificial Sequence
  Cyclic GFR-binding peptide
  MOD_RES (14)..(14): Xaa is C or S
VKAMKVSRQGTPVXELGE

SEQ ID NO: 8706 - protein, 18 aa, Artificial Sequence
  Cyclic GFR-binding peptide
HQGQHPKIRVKAMKVSRQ

SEQ ID NO: 8707 - protein, 20 aa, Artificial Sequence
  Cyclic GFR-binding peptide
FIPKKRVIEVKAVKVSRLQV

SEQ ID NO: 8708 - protein, 23 aa, Artificial Sequence
  Cyclic GFR-binding peptide
  MOD_RES (19)..(19): Xaa is C or S
VYEIKRVQVPRHHVRSPQXKVSS

SEQ ID NO: 8709 - protein, 23 aa, Artificial Sequence
  Cyclic GFR-binding peptide
  MOD_RES (19)..(19): Xaa is C or S
VYEMIQVTINSHHVRSPQXKVSS

SEQ ID NO: 8710 - protein, 29 aa, Artificial Sequence
  Cyclic GFR-binding peptide
  MOD_RES (23)..(23): Xaa is C or S
HQGQHPKIRIKRMQVPREETPVXELGEDN

SEQ ID NO: 8711 - protein, 29 aa, Artificial Sequence
  Cyclic GFR-binding peptide
  MOD_RES (25)..(25): Xaa is C or S
FIPKKRVIEVKAVKVSRLQVQTPRXQVNR

SEQ ID NO: 8712 - protein, 25 aa, Artificial Sequence
  Cyclic GFR-binding peptide
  MOD_RES (21)..(21): Xaa is C or S
KRVIEVKAVKVSRLQVQTPRXQVNR

SEQ ID NO: 8713 - protein, 22 aa, Artificial Sequence
  Cyclic GFR-binding peptide
  MOD_RES (16)..(16): Xaa is C or S
IRIKRMQVPREETPVXELGEDN

SEQ ID NO: 8714 - protein, 20 aa, Artificial Sequence
  Cyclic GFR-binding peptide
  MOD_RES (14)..(14): Xaa is C or S
VKAMKVSRQGTPVXELGEDN

SEQ ID NO: 8715 - protein, 17 aa, Artificial Sequence
  Cyclic GFR-binding peptide
  MOD_RES (14)..(14): Xaa is C or S
VKAMKVSRQGTPVXELG

SEQ ID NO: 8716 - protein, 18 aa, Artificial Sequence
  Cyclic GFR-binding peptide
HQGQHPKIRVKAMKVSRE

SEQ ID NO: 8717 - protein, 25 aa, Artificial Sequence
  Cyclic GFR-binding peptide
  MOD_RES (21)..(21): Xaa is C or S
KRVIEMIQVTINSLQVQTPRXQVNR

SEQ ID NO: 8718 - protein, 18 aa, Artificial Sequence
  Cyclic GFR-binding peptide
  MOD_RES (16)..(16): Xaa is C or S
IKRVQVPRHHVRSPQXKV

SEQ ID NO: 8719 - protein, 17 aa, Artificial Sequence
  Cyclic GFR-binding peptide
  MOD_RES (16)..(16): Xaa is C or S
IKRVQVPRHHVRSPQXK

SEQ ID NO: 8720 - protein, 26 aa, Artificial Sequence
  Cyclic GFR-binding peptide
  MOD_RES (20)..(20): Xaa is C or S
QHPKIRIKRMQVPRQGTPVXELGEDN

SEQ ID NO: 8721 - protein, 17 aa, Artificial Sequence
  Cyclic GFR-binding peptide
  MOD_RES (14)..(14): Xaa is C or S
VKAMKVSREETPVXELG

SEQ ID NO: 8722 - protein, 19 aa, Artificial Sequence
  Cyclic GFR-binding peptide
HQGQHPKIRVKAMKVSREE

SEQ ID NO: 8723 - protein, 18 aa, Artificial Sequence
  Cyclic GFR-binding peptide
  MOD_RES (14)..(14): Xaa is C or S
VKAMKVSREETPVXELGE

SEQ ID NO: 8724 - protein, 16 aa, Artificial Sequence
  Cyclic GFR-binding peptide
  MOD_RES (16)..(16): Xaa is C or S
IKRVQVPRHHVRSPQX

SEQ ID NO: 8725 - protein, 29 aa, Artificial Sequence
  Cyclic GFR-binding peptide
  MOD_RES (25)..(25): Xaa is C or S
LKPKKRVYEMIQVTINSHHVRSPQXKVSS

SEQ ID NO: 8726 - protein, 29 aa, Artificial Sequence
  Cyclic GFR-binding peptide
  MOD_RES (25)..(25): Xaa is C or S
LKPKKRVYEIKRVQVPRHHVRSPQXKVSS

SEQ ID NO: 8727 - protein, 19 aa, Artificial Sequence
  Cyclic GFR-binding peptide
FIPKKRVIEVKAVKVSRLQ

SEQ ID NO: 8728 - protein, 22 aa, Artificial Sequence
  Cyclic GFR-binding peptide
  MOD_RES (16)..(16): Xaa is C or S
IRIKRMQVPRQGTPVXELGEDN

SEQ ID NO: 8729 - protein, 20 aa, Artificial Sequence
  Cyclic GFR-binding peptide
HQGQHPKIRIKRMQVPRQGT

SEQ ID NO: 8730 - protein, 18 aa, Artificial Sequence
  Cyclic GFR-binding peptide
  MOD_RES (16)..(16): Xaa is C or S
MIQVTINSLQVQTPRXQV

SEQ ID NO: 8731 - protein, 19 aa, Artificial Sequence
  Cyclic GFR-binding peptide
LKPKKRVYEMIQVTINSHH

SEQ ID NO: 8732 - protein, 14 aa, Artificial Sequence
  Cyclic GFR-binding peptide
IKRVQVPRHHVRSP

SEQ ID NO: 8733 - protein, 26 aa, Artificial Sequence
  Cyclic GFR-binding peptide
  MOD_RES (20)..(20): Xaa is C or S
QHPKIRIKRMQVPREETPVXELGEDN

SEQ ID NO: 8734 - protein, 21 aa, Artificial Sequence
  Cyclic GFR-binding peptide
  MOD_RES (17)..(17): Xaa is C or S
EIKRVQVPRHHVRSPQXKVSS

SEQ ID NO: 8735 - protein, 17 aa, Artificial Sequence
  Cyclic GFR-binding peptide
HQGQHPKIRIKRMQVPR

SEQ ID NO: 8736 - protein, 23 aa, Artificial Sequence
  Cyclic GFR-binding peptide
  MOD_RES (17)..(17): Xaa is C or S
KIRVKAMKVSREETPVXELGEDN

SEQ ID NO: 8737 - protein, 14 aa, Artificial Sequence
  Cyclic GFR-binding peptide
  MOD_RES (14)..(14): Xaa is C or S
VKAMKVSREETPVX

SEQ ID NO: 8738 - protein, 27 aa, Artificial Sequence
  Cyclic GFR-binding peptide
  MOD_RES (21)..(21): Xaa is C or S
GQHPKIRIKRMQVPRQGTPVXELGEDN

SEQ ID NO: 8739 - protein, 29 aa, Artificial Sequence
  Cyclic GFR-binding peptide
  MOD_RES (23)..(23): Xaa is C or S
HQGQHPKIRVKAMKVSRQGTPVXELGEDN

SEQ ID NO: 8740 - protein, 15 aa, Artificial Sequence
  Cyclic GFR-binding peptide
MIQVTINSLQVQTPR

SEQ ID NO: 8741 - protein, 26 aa, Artificial Sequence
  Cyclic GFR-binding peptide
  MOD_RES (22)..(22): Xaa is C or S
KKRVIEVKAVKVSRLQVQTPRXQVNR

SEQ ID NO: 8742 - protein, 15 aa, Artificial Sequence
  Cyclic GFR-binding peptide
VKAVKVSRLQVQTPR

SEQ ID NO: 8743 - protein, 20 aa, Artificial Sequence
  Cyclic GFR-binding peptide
  MOD_RES (16)..(16): Xaa is C or S
MIQVTINSLQVQTPRXQVNR

SEQ ID NO: 8744 - protein, 25 aa, Artificial Sequence
  Cyclic GFR-binding peptide
  MOD_RES (19)..(19): Xaa is C or S
HPKIRIKRMQVPRQGTPVXELGEDN

SEQ ID NO: 8745 - protein, 21 aa, Artificial Sequence
  Cyclic GFR-binding peptide
  MOD_RES (15)..(15): Xaa is C or S
RIKRMQVPREETPVXELGEDN

SEQ ID NO: 8746 - protein, 15 aa, Artificial Sequence
  Cyclic GFR-binding peptide
IKRVQVPRHHVRSPQ

SEQ ID NO: 8747 - protein, 14 aa, Artificial Sequence
  Cyclic GFR-binding peptide
  MOD_RES (14)..(14): Xaa is C or S
IKRMQVPRQGTPVX

SEQ ID NO: 8748 - protein, 19 aa, Artificial Sequence
  Cyclic GFR-binding peptide
  MOD_RES (16)..(16): Xaa is C or S
IKRVQVPRHHVRSPQXKVS

SEQ ID NO: 8749 - protein, 20 aa, Artificial Sequence
  Cyclic GFR-binding peptide
  MOD_RES (16)..(16): Xaa is C or S
VKAVKVSRLQVQTPRXQVNR

SEQ ID NO: 8750 - protein, 17 aa, Artificial Sequence
  Cyclic GFR-binding peptide
  MOD_RES (14)..(14): Xaa is C or S
IKRMQVPREETPVXELG

SEQ ID NO: 8751 - protein, 21 aa, Artificial Sequence
  Cyclic GFR-binding peptide
LKPKKRVYEMIQVTINSHHVR

SEQ ID NO: 8752 - protein, 27 aa, Artificial Sequence
  Cyclic GFR-binding peptide
  MOD_RES (21)..(21): Xaa is C or S
GQHPKIRVKAMKVSRQGTPVXELGEDN

SEQ ID NO: 8753 - protein, 20 aa, Artificial Sequence
  Cyclic GFR-binding peptide
HQGQHPKIRVKAMKVSREET

SEQ ID NO: 8754 - protein, 20 aa, Artificial Sequence
  Cyclic GFR-binding peptide
  MOD_RES (14)..(14): Xaa is C or S
VKAMKVSREETPVXELGEDN

SEQ ID NO: 8755 - protein, 16 aa, Artificial Sequence
  Cyclic GFR-binding peptide
  MOD_RES (14)..(14): Xaa is C or S
IKRMQVPREETPVXEL

SEQ ID NO: 8756 - protein, 17 aa, Artificial Sequence
  Cyclic GFR-binding peptide
LKPKKRVYEMIQVTINS

SEQ ID NO: 8757 - protein, 18 aa, Artificial Sequence
  Cyclic GFR-binding peptide
  MOD_RES (16)..(16): Xaa is C or S
VKAVKVSRLQVQTPRXQV

SEQ ID NO: 8758 - protein, 17 aa, Artificial Sequence
  Cyclic GFR-binding peptide
  MOD_RES (16)..(16): Xaa is C or S
MIQVTINSHHVRSPQXK

SEQ ID NO: 8759 - protein, 17 aa, Artificial Sequence
  Cyclic GFR-binding peptide
FIPKKRVIEVKAVKVSR

SEQ ID NO: 8760 - protein, 26 aa, Artificial Sequence
  Cyclic GFR-binding peptide
  MOD_RES (20)..(20): Xaa is C or S
QHPKIRVKAMKVSRQGTPVXELGEDN

SEQ ID NO: 8761 - protein, 23 aa, Artificial Sequence
  Cyclic GFR-binding peptide
  MOD_RES (17)..(17): Xaa is C or S
KIRIKRMQVPREETPVXELGEDN

SEQ ID NO: 8762 - protein, 22 aa, Artificial Sequence
  Cyclic GFR-binding peptide
  MOD_RES (16)..(16): Xaa is C or S
IRVKAMKVSRQGTPVXELGEDN

SEQ ID NO: 8763 - protein, 21 aa, Artificial Sequence
  Cyclic GFR-binding peptide
HQGQHPKIRIKRMQVPREETP

SEQ ID NO: 8764 - protein, 25 aa, Artificial Sequence
  Cyclic GFR-binding peptide
  MOD_RES (19)..(19): Xaa is C or S
HPKIRIKRMQVPREETPVXELGEDN

SEQ ID NO: 8765 - protein, 18 aa, Artificial Sequence
  Cyclic GFR-binding peptide
HQGQHPKIRIKRMQVPRQ

SEQ ID NO: 8766 - protein, 27 aa, Artificial Sequence
  Cyclic GFR-binding peptide
  MOD_RES (23)..(23): Xaa is C or S
PKKRVIEMIQVTINSLQVQTPRXQVNR

SEQ ID NO: 8767 - protein, 23 aa, Artificial Sequence
  Cyclic GFR-binding peptide
  MOD_RES (17)..(17): Xaa is C or S
KIRVKAMKVSRQGTPVXELGEDN

SEQ ID NO: 8768 - protein, 28 aa, Artificial Sequence
  Cyclic GFR-binding peptide
  MOD_RES (22)..(22): Xaa is C or S
QGQHPKIRIKRMQVPRQGTPVXELGEDN

SEQ ID NO: 8769 - protein, 23 aa, Artificial Sequence
  Cyclic GFR-binding peptide
  MOD_RES (17)..(17): Xaa is C or S
KIRIKRMQVPRQGTPVXELGEDN

SEQ ID NO: 8770 - protein, 19 aa, Artificial Sequence
  Cyclic GFR-binding peptide
  MOD_RES (14)..(14): Xaa is C or S
VKAMKVSRQGTPVXELGED

SEQ ID NO: 8771 - protein, 13 aa, Artificial Sequence
  Cyclic GFR-binding peptide
MIQVTINSHHVRS

SEQ ID NO: 8772 - protein, 21 aa, Artificial Sequence
  Cyclic GFR-binding peptide
  MOD_RES (15)..(15): Xaa is C or S
RVKAMKVSRQGTPVXELGEDN

SEQ ID NO: 8773 - protein, 19 aa, Artificial Sequence
  Cyclic GFR-binding peptide
HQGQHPKIRIKRMQVPRQG

SEQ ID NO: 8774 - protein, 20 aa, Artificial Sequence
  Cyclic GFR-binding peptide
  MOD_RES (16)..(16): Xaa is C or S
MIQVTINSHHVRSPQXKVSS

SEQ ID NO: 8775 - protein, 21 aa, Artificial Sequence
  Cyclic GFR-binding peptide
FIPKKRVIEVKAVKVSRLQVQ

SEQ ID NO: 8776 - protein, 20 aa, Artificial Sequence
  Cyclic GFR-binding peptide
LKPKKRVYEMIQVTINSHHV

SEQ ID NO: 8777 - protein, 18 aa, Artificial Sequence
  Cyclic GFR-binding peptide
FIPKKRVIEMIQVTINSL

SEQ ID NO: 8778 - protein, 14 aa, Artificial Sequence
  Cyclic GFR-binding peptide
  MOD_RES (14)..(14): Xaa is C or S
VKAMKVSRQGTPVX

SEQ ID NO: 8779 - protein, 19 aa, Artificial Sequence
  Cyclic GFR-binding peptide
  MOD_RES (14)..(14): Xaa is C or S
IKRMQVPREETPVXELGED

SEQ ID NO: 8780 - protein, 21 aa, Artificial Sequence
  Cyclic GFR-binding peptide
  MOD_RES (17)..(17): Xaa is C or S
EMIQVTINSHHVRSPQXKVSS

SEQ ID NO: 8781 - protein, 13 aa, Artificial Sequence
  Cyclic GFR-binding peptide
IKRMQVPREETPV

SEQ ID NO: 8782 - protein, 18 aa, Artificial Sequence
  Cyclic GFR-binding peptide
  MOD_RES (16)..(16): Xaa is C or S
MIQVTINSHHVRSPQXKV

SEQ ID NO: 8783 - protein, 27 aa, Artificial Sequence
  Cyclic GFR-binding peptide
  MOD_RES (21)..(21): Xaa is C or S
GQHPKIRVKAMKVSREETPVXELGEDN

SEQ ID NO: 8784 - protein, 22 aa, Artificial Sequence
  Cyclic GFR-binding peptide
  MOD_RES (16)..(16): Xaa is C or S
IRVKAMKVSREETPVXELGEDN

SEQ ID NO: 8785 - protein, 28 aa, Artificial Sequence
  Cyclic GFR-binding peptide
  MOD_RES (24)..(24): Xaa is C or S
IPKKRVIEMIQVTINSLQVQTPRXQVNR

SEQ ID NO: 8786 - protein, 16 aa, Artificial Sequence
  Cyclic GFR-binding peptide
  MOD_RES (16)..(16): Xaa is C or S
VKAVKVSRLQVQTPRX

SEQ ID NO: 8787 - protein, 14 aa, Artificial Sequence
  Cyclic GFR-binding peptide
VKAVKVSRLQVQTP

SEQ ID NO: 8788 - protein, 13 aa, Artificial Sequence
  Cyclic GFR-binding peptide
IKRVQVPRHHVRS

SEQ ID NO: 8789 - protein, 27 aa, Artificial Sequence
  Cyclic GFR-binding peptide
  MOD_RES (21)..(21): Xaa is C or S
GQHPKIRIKRMQVPREETPVXELGEDN

SEQ ID NO: 8790 - protein, 21 aa, Artificial Sequence
  Cyclic GFR-binding peptide
  MOD_RES (15)..(15): Xaa is C or S
RVKAMKVSREETPVXELGEDN

SEQ ID NO: 8791 - protein, 23 aa, Artificial Sequence
  Cyclic GFR-binding peptide
  MOD_RES (19)..(19): Xaa is C or S
VIEVKAVKVSRLQVQTPRXQVNR

SEQ ID NO: 8792 - protein, 25 aa, Artificial Sequence
  Cyclic GFR-binding peptide
  MOD_RES (21)..(21): Xaa is C or S
KRVYEIKRVQVPRHHVRSPQXKVSS

SEQ ID NO: 8793 - protein, 22 aa, Artificial Sequence
  Cyclic GFR-binding peptide
  MOD_RES (18)..(18): Xaa is C or S
IEVKAVKVSRLQVQTPRXQVNR

SEQ ID NO: 8794 - protein, 26 aa, Artificial Sequence
  Cyclic GFR-binding peptide
  MOD_RES (22)..(22): Xaa is C or S
KKRVYEMIQVTINSHHVRSPQXKVSS

SEQ ID NO: 8795 - protein, 17 aa, Artificial Sequence
  Cyclic GFR-binding peptide
  MOD_RES (16)..(16): Xaa is C or S
MIQVTINSLQVQTPRXQ

SEQ ID NO: 8796 - protein, 25 aa, Artificial Sequence
  Cyclic GFR-binding peptide
  MOD_RES (21)..(21): Xaa is C or S
KRVYEMIQVTINSHHVRSPQXKVSS

SEQ ID NO: 8797 - protein, 18 aa, Artificial Sequence
  Cyclic GFR-binding peptide
  MOD_RES (14)..(14): Xaa is C or S
IKRMQVPREETPVXELGE

SEQ ID NO: 8798 - protein, 20 aa, Artificial Sequence
  Cyclic GFR-binding peptide
FIPKKRVIEMIQVTINSLQV

SEQ ID NO: 8799 - protein, 18 aa, Artificial Sequence
  Cyclic GFR-binding peptide
  MOD_RES (14)..(14): Xaa is C or S
IKRMQVPRQGTPVXELGE

SEQ ID NO: 8800 - protein, 20 aa, Artificial Sequence
  Cyclic GFR-binding peptide
  MOD_RES (14)..(14): Xaa is C or S
IKRMQVPRQGTPVXELGEDN

SEQ ID NO: 8801 - protein, 17 aa, Artificial Sequence
  Cyclic GFR-binding peptide
  MOD_RES (16)..(16): Xaa is C or S
VKAVKVSRLQVQTPRXQ

SEQ ID NO: 8802 - protein, 29 aa, Artificial Sequence
  Cyclic GFR-binding peptide
  MOD_RES (23)..(23): Xaa is C or S
HQGQHPKIRIKRMQVPRQGTPVXELGEDN

SEQ ID NO: 8803 - protein, 25 aa, Artificial Sequence
  Cyclic GFR-binding peptide
  MOD_RES (19)..(19): Xaa is C or S
HPKIRVKAMKVSREETPVXELGEDN

SEQ ID NO: 8804 - protein, 15 aa, Artificial Sequence
  Cyclic GFR-binding peptide
  MOD_RES (14)..(14): Xaa is C or S
IKRMQVPRQGTPVXE

SEQ ID NO: 8805 - protein, 26 aa, Artificial Sequence
  Cyclic GFR-binding peptide
  MOD_RES (22)..(22): Xaa is C or S
KKRVYEIKRVQVPRHHVRSPQXKVSS

SEQ ID NO: 8806 - protein, 20 aa, Artificial Sequence
  Cyclic GFR-binding peptide
  MOD_RES (14)..(14): Xaa is C or S
IKRMQVPREETPVXELGEDN

SEQ ID NO: 8807 - protein, 19 aa, Artificial Sequence
  Cyclic GFR-binding peptide
LKPKKRVYEIKRVQVPRHH

SEQ ID NO: 8808 - protein, 17 aa, Artificial Sequence
  Cyclic GFR-binding peptide
  MOD_RES (14)..(14): Xaa is C or S
IKRMQVPRQGTPVXELG

SEQ ID NO: 8809 - protein, 19 aa, Artificial Sequence
  Cyclic GFR-binding peptide
  MOD_RES (16)..(16): Xaa is C or S
MIQVTINSHHVRSPQXKVS

SEQ ID NO: 8810 - protein, 16 aa, Artificial Sequence
  Cyclic GFR-binding peptide
  MOD_RES (14)..(14): Xaa is C or S
VKAMKVSREETPVXEL

SEQ ID NO: 8811 - protein, 27 aa, Artificial Sequence
  Cyclic GFR-binding peptide
  MOD_RES (23)..(23): Xaa is C or S
PKKRVIEVKAVKVSRLQVQTPRXQVNR

SEQ ID NO: 8812 - protein, 19 aa, Artificial Sequence
  Cyclic GFR-binding peptide
HQGQHPKIRVKAMKVSRQG

SEQ ID NO: 8813 - protein, 19 aa, Artificial Sequence
  Cyclic GFR-binding peptide
  MOD_RES (16)..(16): Xaa is C or S
MIQVTINSLQVQTPRXQVN

SEQ ID NO: 8814 - protein, 16 aa, Artificial Sequence
  Cyclic GFR-binding peptide
  MOD_RES (16)..(16): Xaa is C or S
MIQVTINSHHVRSPQX

SEQ ID NO: 8815 - protein, 26 aa, Artificial Sequence
  Cyclic GFR-binding peptide
  MOD_RES (22)..(22): Xaa is C or S
KKRVIEMIQVTINSLQVQTPRXQVNR

SEQ ID NO: 8816 - protein, 18 aa, Artificial Sequence
  Cyclic GFR-binding peptide
LKPKKRVYEIKRVQVPRH

SEQ ID NO: 8817 - protein, 15 aa, Artificial Sequence
  Cyclic GFR-binding peptide
  MOD_RES (14)..(14): Xaa is C or S
IKRMQVPREETPVXE

SEQ ID NO: 8818 - protein, 21 aa, Artificial Sequence
  Cyclic GFR-binding peptide
FIPKKRVIEMIQVTINSLQVQ

SEQ ID NO: 8819 - protein, 18 aa, Artificial Sequence
  Cyclic GFR-binding peptide
FIPKKRVIEVKAVKVSRL

SEQ ID NO: 8820 - protein, 18 aa, Artificial Sequence
  Cyclic GFR-binding peptide
LKPKKRVYEMIQVTINSH

SEQ ID NO: 8821 - protein, 17 aa, Artificial Sequence
  Cyclic GFR-binding peptide
FIPKKRVIEMIQVTINS

SEQ ID NO: 8822 - protein, 28 aa, Artificial Sequence
  Cyclic GFR-binding peptide
  MOD_RES (22)..(22): Xaa is C or S
QGQHPKIRVKAMKVSREETPVXELGEDN

SEQ ID NO: 8823 - protein, 28 aa, Artificial Sequence
  Cyclic GFR-binding peptide
  MOD_RES (5)..(5): Xaa is C or S
SSVKXQPSRVHHRPVQVRKIEYVRKKPK

SEQ ID NO: 8824 - protein, 13 aa, Artificial Sequence
  Cyclic GFR-binding peptide
TQVQLRSVKVAKV

SEQ ID NO: 8825 - protein, 13 aa, Artificial Sequence
  Cyclic GFR-binding peptide
VPTGQRPVQMRKI

SEQ ID NO: 8826 - protein, 23 aa, Artificial Sequence
  Cyclic GFR-binding peptide
  MOD_RES (5)..(5): Xaa is C or S
RNVQXRPTQVQLSNITVQIMEIV

SEQ ID NO: 8827 - protein, 19 aa, Artificial Sequence
  Cyclic GFR-binding peptide
  MOD_RES (6)..(6): Xaa is C or S
DEGLEXVPTGQRPVQMRKI

SEQ ID NO: 8828 - protein, 18 aa, Artificial Sequence
  Cyclic GFR-binding peptide
ERPVQMRKIRIKPHQGQH

SEQ ID NO: 8829 - protein, 25 aa, Artificial Sequence
  Cyclic GFR-binding peptide
  MOD_RES (7)..(7): Xaa is C or S
NDEGLEXVPTGQRSVKMAKVRIKPH

SEQ ID NO: 8830 - protein, 28 aa, Artificial Sequence
  Cyclic GFR-binding peptide
  MOD_RES (5)..(5): Xaa is C or S
SSVKXQPSRVHHSNITVQIMEYVRKKPK

SEQ ID NO: 8831 - protein, 16 aa, Artificial Sequence
  Cyclic GFR-binding peptide
  MOD_RES (3)..(3): Xaa is C or S
LEXVPTGQRSVKMAKV

SEQ ID NO: 8832 - protein, 29 aa, Artificial Sequence
  Cyclic GFR-binding peptide
  MOD_RES (7)..(7): Xaa is C or S
NDEGLEXVPTEERSVKMAKVRIKPHQGQH

SEQ ID NO: 8833 - protein, 19 aa, Artificial Sequence
  Cyclic GFR-binding peptide
EERPVQMRKIRIKPHQGQH

SEQ ID NO: 8834 - protein, 22 aa, Artificial Sequence
  Cyclic GFR-binding peptide
  MOD_RES (5)..(5): Xaa is C or S
SSVKXQPSRVHHRPVQVRKIEY

SEQ ID NO: 8835 - protein, 13 aa, Artificial Sequence
  Cyclic GFR-binding peptide
TQVQLSNITVQIM

SEQ ID NO: 8836 - protein, 19 aa, Artificial Sequence
  Cyclic GFR-binding peptide
  MOD_RES (6)..(6): Xaa is C or S
DEGLEXVPTEERSVKMAKV

SEQ ID NO: 8837 - protein, 17 aa, Artificial Sequence
  Cyclic GFR-binding peptide
RPVQVRKIEYVRKKPKL

SEQ ID NO: 8838 - protein, 13 aa, Artificial Sequence
  Cyclic GFR-binding peptide
VPTEERSVKMAKV

SEQ ID NO: 8839 - protein, 28 aa, Artificial Sequence
  Cyclic GFR-binding peptide
  MOD_RES (7)..(7): Xaa is C or S
NDEGLEXVPTEERPVQMRKIRIKPHQGQ

SEQ ID NO: 8840 - protein, 21 aa, Artificial Sequence
  Cyclic GFR-binding peptide
RVHHRPVQVRKIEYVRKKPKL

SEQ ID NO: 8841 - protein, 16 aa, Artificial Sequence
  Cyclic GFR-binding peptide
  MOD_RES (1)..(1): Xaa is C or S
XRPTQVQLSNITVQIM

SEQ ID NO: 8842 - protein, 14 aa, Artificial Sequence
  Cyclic GFR-binding peptide
PSRVHHSNITVQIM

SEQ ID NO: 8843 - protein, 20 aa, Artificial Sequence
  Cyclic GFR-binding peptide
VHHRPVQVRKIEYVRKKPKL

SEQ ID NO: 8844 - protein, 20 aa, Artificial Sequence
  Cyclic GFR-binding peptide
TGQRSVKMAKVRIKPHQGQH

SEQ ID NO: 8845 - protein, 22 aa, Artificial Sequence
  Cyclic GFR-binding peptide
  MOD_RES (5)..(5): Xaa is C or S
RNVQXRPTQVQLSNITVQIMEI

SEQ ID NO: 8846 - protein, 17 aa, Artificial Sequence
  Cyclic GFR-binding peptide
RSVKMAKVRIKPHQGQH

SEQ ID NO: 8847 - protein, 15 aa, Artificial Sequence
  Cyclic GFR-binding peptide
  MOD_RES (2)..(2): Xaa is C or S
EXVPTGQRSVKMAKV

SEQ ID NO: 8848 - protein, 21 aa, Artificial Sequence
  Cyclic GFR-binding peptide
PTGQRSVKMAKVRIKPHQGQH

SEQ ID NO: 8849 - protein, 28 aa, Artificial Sequence
  Cyclic GFR-binding peptide
  MOD_RES (7)..(7): Xaa is C or S
NDEGLEXVPTGQRSVKMAKVRIKPHQGQ

SEQ ID NO: 8850 - protein, 20 aa, Artificial Sequence
  Cyclic GFR-binding peptide
  MOD_RES (5)..(5): Xaa is C or S
SSVKXQPSRVHHRPVQVRKI

SEQ ID NO: 8851 - protein, 20 aa, Artificial Sequence
  Cyclic GFR-binding peptide
TEERPVQMRKIRIKPHQGQH

SEQ ID NO: 8852 - protein, 15 aa, Artificial Sequence
  Cyclic GFR-binding peptide
  MOD_RES (2)..(2): Xaa is C or S
EXVPTEERSVKMAKV

SEQ ID NO: 8853 - protein, 28 aa, Artificial Sequence
  Cyclic GFR-binding peptide
  MOD_RES (5)..(5): Xaa is C or S
RNVQXRPTQVQLRSVKVAKVEIVRKKPI

SEQ ID NO: 8854 - protein, 14 aa, Artificial Sequence
  Cyclic GFR-binding peptide
  MOD_RES (1)..(1): Xaa is C or S
XVPTEERPVQMRKI

SEQ ID NO: 8855 - protein, 27 aa, Artificial Sequence
  Cyclic GFR-binding peptide
  MOD_RES (5)..(5): Xaa is C or S
SSVKXQPSRVHHSNITVQIMEYVRKKP

SEQ ID NO: 8856 - protein, 19 aa, Artificial Sequence
  Cyclic GFR-binding peptide
QLSNITVQIMEIVRKKPIF

SEQ ID NO: 8857 - protein, 26 aa, Artificial Sequence
  Cyclic GFR-binding peptide
  MOD_RES (7)..(7): Xaa is C or S
NDEGLEXVPTEERSVKMAKVRIKPHQ

SEQ ID NO: 8858 - protein, 15 aa, Artificial Sequence
  Cyclic GFR-binding peptide
QPSRVHHSNITVQIM

SEQ ID NO: 8859 - protein, 21 aa, Artificial Sequence
  Cyclic GFR-binding peptide
  MOD_RES (5)..(5): Xaa is C or S
RNVQXRPTQVQLRSVKVAKVE

SEQ ID NO: 8860 - protein, 19 aa, Artificial Sequence
  Cyclic GFR-binding peptide
  MOD_RES (4)..(4): Xaa is C or S
NVQXRPTQVQLRSVKVAKV

SEQ ID NO: 8861 - protein, 21 aa, Artificial Sequence
  Cyclic GFR-binding peptide
PTGQRPVQMRKIRIKPHQGQH

SEQ ID NO: 8862 - protein, 29 aa, Artificial Sequence
  Cyclic GFR-binding peptide
  MOD_RES (5)..(5): Xaa is C or S
RNVQXRPTQVQLSNITVQIMEIVRKKPIF

SEQ ID NO: 8863 - protein, 16 aa, Artificial Sequence
  Cyclic GFR-binding peptide
  MOD_RES (3)..(3): Xaa is C or S
LEXVPTGQRPVQMRKI

SEQ ID NO: 8864 - protein, 14 aa, Artificial Sequence
  Cyclic GFR-binding peptide
PTQVQLSNITVQIM

SEQ ID NO: 8865 - protein, 21 aa, Artificial Sequence
  Cyclic GFR-binding peptide
PTEERSVKMAKVRIKPHQGQH

SEQ ID NO: 8866 - protein, 22 aa, Artificial Sequence
  Cyclic GFR-binding peptide
  MOD_RES (5)..(5): Xaa is C or S
SSVKXQPSRVHHSNITVQIMEY

SEQ ID NO: 8867 - protein, 27 aa, Artificial Sequence
  Cyclic GFR-binding peptide
  MOD_RES (5)..(5): Xaa is C or S
SSVKXQPSRVHHRPVQVRKIEYVRKKP

SEQ ID NO: 8868 - protein, 21 aa, Artificial Sequence
  Cyclic GFR-binding peptide
  MOD_RES (5)..(5): Xaa is C or S
RNVQXRPTQVQLSNITVQIME

SEQ ID NO: 8869 - protein, 13 aa, Artificial Sequence
  Cyclic GFR-binding peptide
VPTGQRSVKMAKV

SEQ ID NO: 8870 - protein, 21 aa, Artificial Sequence
  Cyclic GFR-binding peptide
  MOD_RES (7)..(7): Xaa is C or S
NDEGLEXVPTGQRPVQMRKIR

SEQ ID NO: 8871 - protein, 18 aa, Artificial Sequence
  Cyclic GFR-binding peptide
  MOD_RES (5)..(5): Xaa is C or S
EGLEXVPTGQRSVKMAKV

SEQ ID NO: 8872 - protein, 18 aa, Artificial Sequence
  Cyclic GFR-binding peptide
QRSVKMAKVRIKPHQGQH

SEQ ID NO: 8873 - protein, 20 aa, Artificial Sequence
  Cyclic GFR-binding peptide
VQLRSVKVAKVEIVRKKPIF

SEQ ID NO: 8874 - protein, 23 aa, Artificial Sequence
  Cyclic GFR-binding peptide
  MOD_RES (5)..(5): Xaa is C or S
SSVKXQPSRVHHRPVQVRKIEYV

SEQ ID NO: 8875 - protein, 23 aa, Artificial Sequence
  Cyclic GFR-binding peptide
  MOD_RES (5)..(5): Xaa is C or S
SSVKXQPSRVHHSNITVQIMEYV

SEQ ID NO: 8876 - protein, 29 aa, Artificial Sequence
  Cyclic GFR-binding peptide
  MOD_RES (7)..(7): Xaa is C or S
NDEGLEXVPTEERPVQMRKIRIKPHQGQH

SEQ ID NO: 8877 - protein, 29 aa, Artificial Sequence
  Cyclic GFR-binding peptide
  MOD_RES (5)..(5): Xaa is C or S
RNVQXRPTQVQLRSVKVAKVEIVRKKPIF

SEQ ID NO: 8878 - protein, 25 aa, Artificial Sequence
  Cyclic GFR-binding peptide
  MOD_RES (5)..(5): Xaa is C or S
RNVQXRPTQVQLRSVKVAKVEIVRK

SEQ ID NO: 8879 - protein, 22 aa, Artificial Sequence
  Cyclic GFR-binding peptide
  MOD_RES (7)..(7): Xaa is C or S
NDEGLEXVPTEERPVQMRKIRI

SEQ ID NO: 8880 - protein, 20 aa, Artificial Sequence
  Cyclic GFR-binding peptide
  MOD_RES (7)..(7): Xaa is C or S
NDEGLEXVPTGQRSVKMAKV

SEQ ID NO: 8881 - protein, 17 aa, Artificial Sequence
  Cyclic GFR-binding peptide
  MOD_RES (4)..(4): Xaa is C or S
GLEXVPTGQRSVKMAKV

SEQ ID NO: 8882 - protein, 18 aa, Artificial Sequence
  Cyclic GFR-binding peptide
ERSVKMAKVRIKPHQGQH

SEQ ID NO: 8883 - protein, 25 aa, Artificial Sequence
  Cyclic GFR-binding peptide
  MOD_RES (5)..(5): Xaa is C or S
RNVQXRPTQVQLSNITVQIMEIVRK

SEQ ID NO: 8884 - protein, 18 aa, Artificial Sequence
  Cyclic GFR-binding peptide
  MOD_RES (3)..(3): Xaa is C or S
VKXQPSRVHHRPVQVRKI

SEQ ID NO: 8885 - protein, 17 aa, Artificial Sequence
  Cyclic GFR-binding peptide
  MOD_RES (2)..(2): Xaa is C or S
KXQPSRVHHRPVQVRKI

SEQ ID NO: 8886 - protein, 26 aa, Artificial Sequence
  Cyclic GFR-binding peptide
  MOD_RES (7)..(7): Xaa is C or S
NDEGLEXVPTGQRPVQMRKIRIKPHQ

SEQ ID NO: 8887 - protein, 17 aa, Artificial Sequence
  Cyclic GFR-binding peptide
  MOD_RES (4)..(4): Xaa is C or S
GLEXVPTEERSVKMAKV

SEQ ID NO: 8888 - protein, 19 aa, Artificial Sequence
  Cyclic GFR-binding peptide
EERSVKMAKVRIKPHQGQH

SEQ ID NO: 8889 - protein, 18 aa, Artificial Sequence
  Cyclic GFR-binding peptide
  MOD_RES (5)..(5): Xaa is C or S
EGLEXVPTEERSVKMAKV

SEQ ID NO: 8890 - protein, 16 aa, Artificial Sequence
  Cyclic GFR-binding peptide
  MOD_RES (1)..(1): Xaa is C or S
XQPSRVHHRPVQVRKI

SEQ ID NO: 8891 - protein, 29 aa, Artificial Sequence
  Cyclic GFR-binding peptide
  MOD_RES (5)..(5): Xaa is C or S
SSVKXQPSRVHHSNITVQIMEYVRKKPKL

SEQ ID NO: 8892 - protein, 29 aa, Artificial Sequence
  Cyclic GFR-binding peptide
  MOD_RES (5)..(5): Xaa is C or S
SSVKXQPSRVHHRPVQVRKIEYVRKKPKL

SEQ ID NO: 8893 - protein, 19 aa, Artificial Sequence
  Cyclic GFR-binding peptide
QLRSVKVAKVEIVRKKPIF

SEQ ID NO: 8894 - protein, 22 aa, Artificial Sequence
  Cyclic GFR-binding peptide
  MOD_RES (7)..(7): Xaa is C or S
NDEGLEXVPTGQRPVQMRKIRI

SEQ ID NO: 8895 - protein, 20 aa, Artificial Sequence
  Cyclic GFR-binding peptide
TGQRPVQMRKIRIKPHQGQH

SEQ ID NO: 8896 - protein, 18 aa, Artificial Sequence
  Cyclic GFR-binding peptide
  MOD_RES (3)..(3): Xaa is C or S
VQXRPTQVQLSNITVQIM

SEQ ID NO: 8897 - protein, 19 aa, Artificial Sequence
  Cyclic GFR-binding peptide
HHSNITVQIMEYVRKKPKL

SEQ ID NO: 8898 - protein, 14 aa, Artificial Sequence
  Cyclic GFR-binding peptide
PSRVHHRPVQVRKI

SEQ ID NO: 8899 - protein, 26 aa, Artificial Sequence
  Cyclic GFR-binding peptide
  MOD_RES (7)..(7): Xaa is C or S
NDEGLEXVPTEERPVQMRKIRIKPHQ

SEQ ID NO: 8900 - protein, 21 aa, Artificial Sequence
  Cyclic GFR-binding peptide
  MOD_RES (5)..(5): Xaa is C or S
SSVKXQPSRVHHRPVQVRKIE

SEQ ID NO: 8901 - protein, 17 aa, Artificial Sequence
  Cyclic GFR-binding peptide
RPVQMRKIRIKPHQGQH

SEQ ID NO: 8902 - protein, 23 aa, Artificial Sequence
  Cyclic GFR-binding peptide
  MOD_RES (7)..(7): Xaa is C or S
NDEGLEXVPTEERSVKMAKVRIK

SEQ ID NO: 8903 - protein, 14 aa, Artificial Sequence
  Cyclic GFR-binding peptide
  MOD_RES (1)..(1): Xaa is C or S
XVPTEERSVKMAKV

SEQ ID NO: 8904 - protein, 27 aa, Artificial Sequence
  Cyclic GFR-binding peptide
  MOD_RES (7)..(7): Xaa is C or S
NDEGLEXVPTGQRPVQMRKIRIKPHQG

SEQ ID NO: 8905 - protein, 29 aa, Artificial Sequence
  Cyclic GFR-binding peptide
  MOD_RES (7)..(7): Xaa is C or S
NDEGLEXVPTGQRSVKMAKVRIKPHQGQH

SEQ ID NO: 8906 - protein, 15 aa, Artificial Sequence
  Cyclic GFR-binding peptide
RPTQVQLSNITVQIM

SEQ ID NO: 8907 - protein, 26 aa, Artificial Sequence
  Cyclic GFR-binding peptide
  MOD_RES (5)..(5): Xaa is C or S
RNVQXRPTQVQLRSVKVAKVEIVRKK

SEQ ID NO: 8908 - protein, 15 aa, Artificial Sequence
  Cyclic GFR-binding peptide
RPTQVQLRSVKVAKV

SEQ ID NO: 8909 - protein, 20 aa, Artificial Sequence
  Cyclic GFR-binding peptide
  MOD_RES (5)..(5): Xaa is C or S
RNVQXRPTQVQLSNITVQIM

SEQ ID NO: 8910 - protein, 25 aa, Artificial Sequence
  Cyclic GFR-binding peptide
  MOD_RES (7)..(7): Xaa is C or S
NDEGLEXVPTGQRPVQMRKIRIKPH

SEQ ID NO: 8911 - protein, 21 aa, Artificial Sequence
  Cyclic GFR-binding peptide
  MOD_RES (7)..(7): Xaa is C or S
NDEGLEXVPTEERPVQMRKIR

SEQ ID NO: 8912 - protein, 15 aa, Artificial Sequence
  Cyclic GFR-binding peptide
QPSRVHHRPVQVRKI

SEQ ID NO: 8913 - protein, 14 aa, Artificial Sequence
  Cyclic GFR-binding peptide
  MOD_RES (1)..(1): Xaa is C or S
XVPTGQRPVQMRKI

SEQ ID NO: 8914 - protein, 19 aa, Artificial Sequence
  Cyclic GFR-binding peptide
  MOD_RES (4)..(4): Xaa is C or S
SVKXQPSRVHHRPVQVRKI

SEQ ID NO: 8915 - protein, 20 aa, Artificial Sequence
  Cyclic GFR-binding peptide
  MOD_RES (5)..(5): Xaa is C or S
RNVQXRPTQVQLRSVKVAKV

SEQ ID NO: 8916 - protein, 17 aa, Artificial Sequence
  Cyclic GFR-binding peptide
  MOD_RES (4)..(4): Xaa is C or S
GLEXVPTEERPVQMRKI

SEQ ID NO: 8917 - protein, 21 aa, Artificial Sequence
  Cyclic GFR-binding peptide
RVHHSNITVQIMEYVRKKPKL

SEQ ID NO: 8918 - protein, 27 aa, Artificial Sequence
  Cyclic GFR-binding peptide
  MOD_RES (7)..(7): Xaa is C or S
NDEGLEXVPTGQRSVKMAKVRIKPHQG

SEQ ID NO: 8919 - protein, 20 aa, Artificial Sequence
  Cyclic GFR-binding peptide
TEERSVKMAKVRIKPHQGQH

SEQ ID NO: 8920 - protein, 20 aa, Artificial Sequence
  Cyclic GFR-binding peptide
  MOD_RES (7)..(7): Xaa is C or S
NDEGLEXVPTEERSVKMAKV

SEQ ID NO: 8921 - protein, 16 aa, Artificial Sequence
  Cyclic GFR-binding peptide
  MOD_RES (3)..(3): Xaa is C or S
LEXVPTEERPVQMRKI

SEQ ID NO: 8922 - protein, 17 aa, Artificial Sequence
  Cyclic GFR-binding peptide
SNITVQIMEYVRKKPKL

SEQ ID NO: 8923 - protein, 18 aa, Artificial Sequence
  Cyclic GFR-binding peptide
  MOD_RES (3)..(3): Xaa is C or S
VQXRPTQVQLRSVKVAKV

SEQ ID NO: 8924 - protein, 17 aa, Artificial Sequence
  Cyclic GFR-binding peptide
  MOD_RES (2)..(2): Xaa is C or S
KXQPSRVHHSNITVQIM

SEQ ID NO: 8925 - protein, 17 aa, Artificial Sequence
  Cyclic GFR-binding peptide
RSVKVAKVEIVRKKPIF

SEQ ID NO: 8926 - protein, 26 aa, Artificial Sequence
  Cyclic GFR-binding peptide
  MOD_RES (7)..(7): Xaa is C or S
NDEGLEXVPTGQRSVKMAKVRIKPHQ

SEQ ID NO: 8927 - protein, 23 aa, Artificial Sequence
  Cyclic GFR-binding peptide
  MOD_RES (7)..(7): Xaa is C or S
NDEGLEXVPTEERPVQMRKIRIK

SEQ ID NO: 8928 - protein, 22 aa, Artificial Sequence
  Cyclic GFR-binding peptide
  MOD_RES (7)..(7): Xaa is C or S
NDEGLEXVPTGQRSVKMAKVRI

SEQ ID NO: 8929 - protein, 21 aa, Artificial Sequence
  Cyclic GFR-binding peptide
PTEERPVQMRKIRIKPHQGQH

SEQ ID NO: 8930 - protein, 25 aa, Artificial Sequence
  Cyclic GFR-binding peptide
  MOD_RES (7)..(7): Xaa is C or S
NDEGLEXVPTEERPVQMRKIRIKPH

SEQ ID NO: 8931 - protein, 18 aa, Artificial Sequence
  Cyclic GFR-binding peptide
QRPVQMRKIRIKPHQGQH

SEQ ID NO: 8932 - protein, 27 aa, Artificial Sequence
  Cyclic GFR-binding peptide
  MOD_RES (5)..(5): Xaa is C or S
RNVQXRPTQVQLSNITVQIMEIVRKKP

SEQ ID NO: 8933 - protein, 23 aa, Artificial Sequence
  Cyclic GFR-binding peptide
  MOD_RES (7)..(7): Xaa is C or S
NDEGLEXVPTGQRSVKMAKVRIK

SEQ ID NO: 8934 - protein, 28 aa, Artificial Sequence
  Cyclic GFR-binding peptide
  MOD_RES (7)..(7): Xaa is C or S
NDEGLEXVPTGQRPVQMRKIRIKPHQGQ

SEQ ID NO: 8935 - protein, 23 aa, Artificial Sequence
  Cyclic GFR-binding peptide
  MOD_RES (7)..(7): Xaa is C or S
NDEGLEXVPTGQRPVQMRKIRIK

SEQ ID NO: 8936 - protein, 19 aa, Artificial Sequence
  Cyclic GFR-binding peptide
  MOD_RES (6)..(6): Xaa is C or S
DEGLEXVPTGQRSVKMAKV

SEQ ID NO: 8937 - protein, 13 aa, Artificial Sequence
  Cyclic GFR-binding peptide
SRVHHSNITVQIM

SEQ ID NO: 8938 - protein, 21 aa, Artificial Sequence
  Cyclic GFR-binding peptide
  MOD_RES (7)..(7): Xaa is C or S
NDEGLEXVPTGQRSVKMAKVR

SEQ ID NO: 8939 - protein, 19 aa, Artificial Sequence
  Cyclic GFR-binding peptide
GQRPVQMRKIRIKPHQGQH

SEQ ID NO: 8940 - protein, 20 aa, Artificial Sequence
  Cyclic GFR-binding peptide
  MOD_RES (5)..(5): Xaa is C or S
SSVKXQPSRVHHSNITVQIM

SEQ ID NO: 8941 - protein, 21 aa, Artificial Sequence
  Cyclic GFR-binding peptide
QVQLRSVKVAKVEIVRKKPIF

SEQ ID NO: 8942 - protein, 20 aa, Artificial Sequence
  Cyclic GFR-binding peptide
VHHSNITVQIMEYVRKKPKL

SEQ ID NO: 8943 - protein, 18 aa, Artificial Sequence
  Cyclic GFR-binding peptide
LSNITVQIMEIVRKKPIF

SEQ ID NO: 8944 - protein, 14 aa, Artificial Sequence
  Cyclic GFR-binding peptide
  MOD_RES (1)..(1): Xaa is C or S
XVPTGQRSVKMAKV

SEQ ID NO: 8945 - protein, 19 aa, Artificial Sequence
  Cyclic GFR-binding peptide
  MOD_RES (6)..(6): Xaa is C or S
DEGLEXVPTEERPVQMRKI

SEQ ID NO: 8946 - protein, 21 aa, Artificial Sequence
  Cyclic GFR-binding peptide
  MOD_RES (5)..(5): Xaa is C or S
SSVKXQPSRVHHSNITVQIME

SEQ ID NO: 8947 - protein, 13 aa, Artificial Sequence
  Cyclic GFR-binding peptide
VPTEERPVQMRKI

SEQ ID NO: 8948 - protein, 18 aa, Artificial Sequence
  Cyclic GFR-binding peptide
  MOD_RES (3)..(3): Xaa is C or S
VKXQPSRVHHSNITVQIM

SEQ ID NO: 8949 - protein, 27 aa, Artificial Sequence
  Cyclic GFR-binding peptide
  MOD_RES (7)..(7): Xaa is C or S
NDEGLEXVPTEERSVKMAKVRIKPHQG

SEQ ID NO: 8950 - protein, 22 aa, Artificial Sequence
  Cyclic GFR-binding peptide
  MOD_RES (7)..(7): Xaa is C or S
NDEGLEXVPTEERSVKMAKVRI

SEQ ID NO: 8951 - protein, 28 aa, Artificial Sequence
  Cyclic GFR-binding peptide
  MOD_RES (5)..(5): Xaa is C or S
RNVQXRPTQVQLSNITVQIMEIVRKKPI

SEQ ID NO: 8952 - protein, 16 aa, Artificial Sequence
  Cyclic GFR-binding peptide
  MOD_RES (1)..(1): Xaa is C or S
XRPTQVQLRSVKVAKV

SEQ ID NO: 8953 - protein, 14 aa, Artificial Sequence
  Cyclic GFR-binding peptide
PTQVQLRSVKVAKV

SEQ ID NO: 8954 - protein, 13 aa, Artificial Sequence
  Cyclic GFR-binding peptide
SRVHHRPVQVRKI

SEQ ID NO: 8955 - protein, 27 aa, Artificial Sequence
  Cyclic GFR-binding peptide
  MOD_RES (7)..(7): Xaa is C or S
NDEGLEXVPTEERPVQMRKIRIKPHQG

SEQ ID NO: 8956 - protein, 21 aa, Artificial Sequence
  Cyclic GFR-binding peptide
  MOD_RES (7)..(7): Xaa is C or S
NDEGLEXVPTEERSVKMAKVR

SEQ ID NO: 8957 - protein, 23 aa, Artificial Sequence
  Cyclic GFR-binding peptide
  MOD_RES (5)..(5): Xaa is C or S
RNVQXRPTQVQLRSVKVAKVEIV

SEQ ID NO: 8958 - protein, 25 aa, Artificial Sequence
  Cyclic GFR-binding peptide
  MOD_RES (5)..(5): Xaa is C or S
SSVKXQPSRVHHRPVQVRKIEYVRK

SEQ ID NO: 8959 - protein, 22 aa, Artificial Sequence
  Cyclic GFR-binding peptide
  MOD_RES (5)..(5): Xaa is C or S
RNVQXRPTQVQLRSVKVAKVEI

SEQ ID NO: 8960 - protein, 26 aa, Artificial Sequence
  Cyclic GFR-binding peptide
  MOD_RES (5)..(5): Xaa is C or S
SSVKXQPSRVHHSNITVQIMEYVRKK

SEQ ID NO: 8961 - protein, 17 aa, Artificial Sequence
  Cyclic GFR-binding peptide
  MOD_RES (2)..(2): Xaa is C or S
QXRPTQVQLSNITVQIM

SEQ ID NO: 8962 - protein, 25 aa, Artificial Sequence
  Cyclic GFR-binding peptide
  MOD_RES (5)..(5): Xaa is C or S
SSVKXQPSRVHHSNITVQIMEYVRK

SEQ ID NO: 8963 - protein, 18 aa, Artificial Sequence
  Cyclic GFR-binding peptide
  MOD_RES (5)..(5): Xaa is C or S
EGLEXVPTEERPVQMRKI

SEQ ID NO: 8964 - protein, 20 aa, Artificial Sequence
  Cyclic GFR-binding peptide
VQLSNITVQIMEIVRKKPIF

SEQ ID NO: 8965 - protein, 18 aa, Artificial Sequence
  Cyclic GFR-binding peptide
  MOD_RES (5)..(5): Xaa is C or S
EGLEXVPTGQRPVQMRKI

SEQ ID NO: 8966 - protein, 20 aa, Artificial Sequence
  Cyclic GFR-binding peptide
  MOD_RES (7)..(7): Xaa is C or S
NDEGLEXVPTGQRPVQMRKI

SEQ ID NO: 8967 - protein, 17 aa, Artificial Sequence
  Cyclic GFR-binding peptide
  MOD_RES (2)..(2): Xaa is C or S
QXRPTQVQLRSVKVAKV

SEQ ID NO: 8968 - protein, 29 aa, Artificial Sequence
  Cyclic GFR-binding peptide
  MOD_RES (7)..(7): Xaa is C or S
NDEGLEXVPTGQRPVQMRKIRIKPHQGQH

SEQ ID NO: 8969 - protein, 25 aa, Artificial Sequence
  Cyclic GFR-binding peptide
  MOD_RES (7)..(7): Xaa is C or S
NDEGLEXVPTEERSVKMAKVRIKPH

SEQ ID NO: 8970 - protein, 15 aa, Artificial Sequence
  Cyclic GFR-binding peptide
  MOD_RES (2)..(2): Xaa is C or S
EXVPTGQRPVQMRKI

SEQ ID NO: 8971 - protein, 26 aa, Artificial Sequence
  Cyclic GFR-binding peptide
  MOD_RES (5)..(5): Xaa is C or S
SSVKXQPSRVHHRPVQVRKIEYVRKK

SEQ ID NO: 8972 - protein, 20 aa, Artificial Sequence
  Cyclic GFR-binding peptide
  MOD_RES (7)..(7): Xaa is C or S
NDEGLEXVPTEERPVQMRKI

SEQ ID NO: 8973 - protein, 19 aa, Artificial Sequence
  Cyclic GFR-binding peptide
HHRPVQVRKIEYVRKKPKL

SEQ ID NO: 8974 - protein, 17 aa, Artificial Sequence
  Cyclic GFR-binding peptide
  MOD_RES (4)..(4): Xaa is C or S
GLEXVPTGQRPVQMRKI

SEQ ID NO: 8975 - protein, 19 aa, Artificial Sequence
  Cyclic GFR-binding peptide
  MOD_RES (4)..(4): Xaa is C or S
SVKXQPSRVHHSNITVQIM

SEQ ID NO: 8976 - protein, 16 aa, Artificial Sequence
  Cyclic GFR-binding peptide
  MOD_RES (3)..(3): Xaa is C or S
LEXVPTEERSVKMAKV

SEQ ID NO: 8977 - protein, 27 aa, Artificial Sequence
  Cyclic GFR-binding peptide
  MOD_RES (5)..(5): Xaa is C or S
RNVQXRPTQVQLRSVKVAKVEIVRKKP

SEQ ID NO: 8978 - protein, 19 aa, Artificial Sequence
  Cyclic GFR-binding peptide
GQRSVKMAKVRIKPHQGQH

SEQ ID NO: 8979 - protein, 19 aa, Artificial Sequence
  Cyclic GFR-binding peptide
  MOD_RES (4)..(4): Xaa is C or S
NVQXRPTQVQLSNITVQIM

SEQ ID NO: 8980 - protein, 16 aa, Artificial Sequence
  Cyclic GFR-binding peptide
  MOD_RES (1)..(1): Xaa is C or S
XQPSRVHHSNITVQIM

SEQ ID NO: 8981 - protein, 26 aa, Artificial Sequence
  Cyclic GFR-binding peptide
  MOD_RES (5)..(5): Xaa is C or S
RNVQXRPTQVQLSNITVQIMEIVRKK

SEQ ID NO: 8982 - protein, 18 aa, Artificial Sequence
  Cyclic GFR-binding peptide
HRPVQVRKIEYVRKKPKL

SEQ ID NO: 8983 - protein, 15 aa, Artificial Sequence
  Cyclic GFR-binding peptide
  MOD_RES (2)..(2): Xaa is C or S
EXVPTEERPVQMRKI

SEQ ID NO: 8984 - protein, 21 aa, Artificial Sequence
  Cyclic GFR-binding peptide
QVQLSNITVQIMEIVRKKPIF

SEQ ID NO: 8985 - protein, 18 aa, Artificial Sequence
  Cyclic GFR-binding peptide
LRSVKVAKVEIVRKKPIF

SEQ ID NO: 8986 - protein, 18 aa, Artificial Sequence
  Cyclic GFR-binding peptide
HSNITVQIMEYVRKKPKL

SEQ ID NO: 8987 - protein, 17 aa, Artificial Sequence
  Cyclic GFR-binding peptide
SNITVQIMEIVRKKPIF

SEQ ID NO: 8988 - protein, 28 aa, Artificial Sequence
  Cyclic GFR-binding peptide
  MOD_RES (7)..(7): Xaa is C or S
NDEGLEXVPTEERSVKMAKVRIKPHQGQ

SEQ ID NO: 8989 - protein, 23 aa, Artificial Sequence
  Cyclic GFR-binding peptide
  MOD_RES (17)..(18): Xaa is C or S
RGVLYLISIPELDQPVXXPSASA

SEQ ID NO: 8990 - protein, 13 aa, Artificial Sequence
  Cyclic GFR-binding peptide
LYLISIPELDQPV

SEQ ID NO: 8991 - protein, 14 aa, Artificial Sequence
  Cyclic GFR-binding peptide
  MOD_RES (14)..(14): Xaa is C or S
FYLISIANLKTPVX

SEQ ID NO: 8992 - protein, 13 aa, Artificial Sequence
  Cyclic GFR-binding peptide
LYLMSIPELETPV

SEQ ID NO: 8993 - protein, 19 aa, Artificial Sequence
  Cyclic GFR-binding peptide
  MOD_RES (14)..(15): Xaa is C or S
KYLISIPSLRAPVXXSAPA

SEQ ID NO: 8994 - protein, 14 aa, Artificial Sequence
  Cyclic GFR-binding peptide
  MOD_RES (14)..(14): Xaa is C or S
LYLISIPELDQSVX

SEQ ID NO: 8995 - protein, 17 aa, Artificial Sequence
  Cyclic GFR-binding peptide
VVNNAADKYLISIPSLR

SEQ ID NO: 8996 - protein, 19 aa, Artificial Sequence
  Cyclic GFR-binding peptide
VVNNAADKYLISIPSLRAP

SEQ ID NO: 8997 - protein, 26 aa, Artificial Sequence
  Cyclic GFR-binding peptide
  MOD_RES (20)..(21): Xaa is C or S
VNSSDDIYLVSIPSLQTPAXXPKPVT

SEQ ID NO: 8998 - protein, 21 aa, Artificial Sequence
  Cyclic GFR-binding peptide
  MOD_RES (15)..(16): Xaa is C or S
DKYLISIPSLKTPVXXAKSAK

SEQ ID NO: 8999 - protein, 16 aa, Artificial Sequence
  Cyclic GFR-binding peptide
  MOD_RES (14)..(14): Xaa is C or S
LYLVSIPELKTPAXTP

SEQ ID NO: 9000 - protein, 19 aa, Artificial Sequence
  Cyclic GFR-binding peptide
IVNSSDDLYLVSIPELKTP

SEQ ID NO: 9001 - protein, 14 aa, Artificial Sequence
  Cyclic GFR-binding peptide
  MOD_RES (14)..(14): Xaa is C or S
IYLISIPSLKTPVX

SEQ ID NO: 9002 - protein, 14 aa, Artificial Sequence
  Cyclic GFR-binding peptide
  MOD_RES (14)..(14): Xaa is C or S
KYLISIPSLKTPVX

SEQ ID NO: 9003 - protein, 18 aa, Artificial Sequence
  Cyclic GFR-binding peptide
VVNNAADLYLISIPELRA

SEQ ID NO: 9004 - protein, 24 aa, Artificial Sequence
  Cyclic GFR-binding peptide
  MOD_RES (18)..(19): Xaa is C or S
ENEDLYLMSIPELETPVXXAKPIK

SEQ ID NO: 9005 - protein, 18 aa, Artificial Sequence
  Cyclic GFR-binding peptide
YTVVGKDFYLISIANLKT

SEQ ID NO: 9006 - protein, 22 aa, Artificial Sequence
  Cyclic GFR-binding peptide
  MOD_RES (16)..(17): Xaa is C or S
SDLYLVSIPELKTPAXXAKPVA

SEQ ID NO: 9007 - protein, 22 aa, Artificial Sequence
  Cyclic GFR-binding peptide
  MOD_RES (16)..(17): Xaa is C or S
DDLYLVSIPELKTPVXXAKGVK

SEQ ID NO: 9008 - protein, 19 aa, Artificial Sequence
  Cyclic GFR-binding peptide
VKPTRGVLYLISIPELDQP

SEQ ID NO: 9009 - protein, 17 aa, Artificial Sequence
  Cyclic GFR-binding peptide
  MOD_RES (14)..(15): Xaa is C or S
LYLISIPELDQSVXXPS

SEQ ID NO: 9010 - protein, 25 aa, Artificial Sequence
  Cyclic GFR-binding peptide
  MOD_RES (19)..(20): Xaa is C or S
KDYEDIYLMSIPSLETPVXXAKPIS

SEQ ID NO: 9011 - protein, 26 aa, Artificial Sequence
  Cyclic GFR-binding peptide
  MOD_RES (20)..(21): Xaa is C or S
KPTRGVLYLISIPELDQPVXXPSASA

SEQ ID NO: 9012 - protein, 16 aa, Artificial Sequence
  Cyclic GFR-binding peptide
  MOD_RES (14)..(15): Xaa is C or S
FYLISIANLRAPVXXS

SEQ ID NO: 9013 - protein, 25 aa, Artificial Sequence
  Cyclic GFR-binding peptide
  MOD_RES (19)..(20): Xaa is C or S
KENEDLYLMSIPELETPVXXAKPIK

SEQ ID NO: 9014 - protein, 22 aa, Artificial Sequence
  Cyclic GFR-binding peptide
  MOD_RES (16)..(17): Xaa is C or S
EDLYLMSIPELETPVXXAKPIS

SEQ ID NO: 9015 - protein, 19 aa, Artificial Sequence
  Cyclic GFR-binding peptide
  MOD_RES (14)..(15): Xaa is C or S
FYLISIANLRAPVXXSAPA

SEQ ID NO: 9016 - protein, 17 aa, Artificial Sequence
  Cyclic GFR-binding peptide
  MOD_RES (14)..(14): Xaa is C or S
LYLVSIPELKTPAXTPK

SEQ ID NO: 9017 - protein, 18 aa, Artificial Sequence
  Cyclic GFR-binding peptide
IVNSSDDIYLVSIPSLQT

SEQ ID NO: 9018 - protein, 18 aa, Artificial Sequence
  Cyclic GFR-binding peptide
IVNSSDDIYLVSIPSLKT

SEQ ID NO: 9019 - protein, 17 aa, Artificial Sequence
  Cyclic GFR-binding peptide
VKPKRGVLYLISIPELA

SEQ ID NO: 9020 - protein, 16 aa, Artificial Sequence
  Cyclic GFR-binding peptide
  MOD_RES (14)..(15): Xaa is C or S
KYLISIPSLRAPVXXS

SEQ ID NO: 9021 - protein, 17 aa, Artificial Sequence
  Cyclic GFR-binding peptide
  MOD_RES (14)..(15): Xaa is C or S
LYLVSIPELKTPAXXAK

SEQ ID NO: 9022 - protein, 23 aa, Artificial Sequence
  Cyclic GFR-binding peptide
  MOD_RES (17)..(18): Xaa is C or S
MDDIYLVSIPSLKTPVXXAKGVK

SEQ ID NO: 9023 - protein, 24 aa, Artificial Sequence
  Cyclic GFR-binding peptide
  MOD_RES (18)..(19): Xaa is C or S
NAADFYLISIANLRAPVXXSAPAA

SEQ ID NO: 9024 - protein, 15 aa, Artificial Sequence
  Cyclic GFR-binding peptide
IVNSSDDLYLVSIPE

SEQ ID NO: 9025 - protein, 15 aa, Artificial Sequence
  Cyclic GFR-binding peptide
  MOD_RES (14)..(15): Xaa is C or S
LYLMSIPELETPVXX

SEQ ID NO: 9026 - protein, 17 aa, Artificial Sequence
  Cyclic GFR-binding peptide
VKPTRGVLYLISIPELD

SEQ ID NO: 9027 - protein, 19 aa, Artificial Sequence
  Cyclic GFR-binding peptide
VVNNAADFYLISIANLRAP

SEQ ID NO: 9028 - protein, 24 aa, Artificial Sequence
  Cyclic GFR-binding peptide
  MOD_RES (18)..(19): Xaa is C or S
GMDDLYLVSIPELKTPVXXAKGVK

SEQ ID NO: 9029 - protein, 25 aa, Artificial Sequence
  Cyclic GFR-binding peptide
  MOD_RES (19)..(20): Xaa is C or S
PKRGVLYLISIPELAQPVXXPAASA

SEQ ID NO: 9030 - protein, 15 aa, Artificial Sequence
  Cyclic GFR-binding peptide
  MOD_RES (14)..(15): Xaa is C or S
LYLISIPELDQPVXX

SEQ ID NO: 9031 - protein, 18 aa, Artificial Sequence
  Cyclic GFR-binding peptide
VKPKRGVIYLISIPSLAQ

SEQ ID NO: 9032 - protein, 14 aa, Artificial Sequence
  Cyclic GFR-binding peptide
  MOD_RES (14)..(14): Xaa is C or S
LYLVSIPELQTPAX

SEQ ID NO: 9033 - protein, 17 aa, Artificial Sequence
  Cyclic GFR-binding peptide
IKPTKGIIYLISIPSLD

SEQ ID NO: 9034 - protein, 26 aa, Artificial Sequence
  Cyclic GFR-binding peptide
  MOD_RES (20)..(21): Xaa is C or S
KPTKGILYLISIPELDQSVXXPSASA

SEQ ID NO: 9035 - protein, 17 aa, Artificial Sequence
  Cyclic GFR-binding peptide
VVNNAADFYLISIANLR

SEQ ID NO: 9036 - protein, 21 aa, Artificial Sequence
  Cyclic GFR-binding peptide
  MOD_RES (15)..(16): Xaa is C or S
DIYLMSIPSLETPVXXAKPIK

SEQ ID NO: 9037 - protein, 22 aa, Artificial Sequence
  Cyclic GFR-binding peptide
  MOD_RES (16)..(17): Xaa is C or S
DDIYLVSIPSLKTPVXXAKGVK

SEQ ID NO: 9038 - protein, 19 aa, Artificial Sequence
  Cyclic GFR-binding peptide
  MOD_RES (14)..(15): Xaa is C or S
LYLISIPELAQPVXXPAAS

SEQ ID NO: 9039 - protein, 27 aa, Artificial Sequence
  Cyclic GFR-binding peptide
  MOD_RES (21)..(22): Xaa is C or S
IKPTKGIIYLISIPSLDQSVXXPSASA

SEQ ID NO: 9040 - protein, 17 aa, Artificial Sequence
  Cyclic GFR-binding peptide
IVNNSSDLYLVSIPELK

SEQ ID NO: 9041 - protein, 27 aa, Artificial Sequence
  Cyclic GFR-binding peptide
  MOD_RES (21)..(21): Xaa is C or S
IVNSSDDIYLVSIPSLKTPAXTPKTVH

SEQ ID NO: 9042 - protein, 24 aa, Artificial Sequence
  Cyclic GFR-binding peptide
  MOD_RES (18)..(18): Xaa is C or S
SSDDIYLVSIPSLKTPAXTPKTVH

SEQ ID NO: 9043 - protein, 23 aa, Artificial Sequence
  Cyclic GFR-binding peptide
  MOD_RES (17)..(18): Xaa is C or S
NEDIYLMSIPSLETPVXXAKPIK

SEQ ID NO: 9044 - protein, 27 aa, Artificial Sequence
  Cyclic GFR-binding peptide
  MOD_RES (21)..(22): Xaa is C or S
VVKENEDLYLMSIPELETPVXXAKPIK

SEQ ID NO: 9045 - protein, 16 aa, Artificial Sequence
  Cyclic GFR-binding peptide
IVNNSSDLYLVSIPEL

SEQ ID NO: 9046 - protein, 19 aa, Artificial Sequence
  Cyclic GFR-binding peptide
YTVVGKDFYLISIANLKTP

SEQ ID NO: 9047 - protein, 16 aa, Artificial Sequence
  Cyclic GFR-binding peptide
  MOD_RES (14)..(15): Xaa is C or S
LYLVSIPELKTPAXXP

SEQ ID NO: 9048 - protein, 21 aa, Artificial Sequence
  Cyclic GFR-binding peptide
  MOD_RES (15)..(15): Xaa is C or S
DIYLVSIPSLKTPAXTPKTVH

SEQ ID NO: 9049 - protein, 17 aa, Artificial Sequence
  Cyclic GFR-binding peptide
  MOD_RES (14)..(15): Xaa is C or S
IYLMSIPSLETPVXXAK

SEQ ID NO: 9050 - protein, 15 aa, Artificial Sequence
  Cyclic GFR-binding peptide
IVNNSSDIYLVSIPS

SEQ ID NO: 9051 - protein, 19 aa, Artificial Sequence
  Cyclic GFR-binding peptide
VVKDYEDIYLMSIPSLETP

SEQ ID NO: 9052 - protein, 27 aa, Artificial Sequence
  Cyclic GFR-binding peptide
  MOD_RES (21)..(22): Xaa is C or S
VVNNAADLYLISIPELRAPVXXSAPAA

SEQ ID NO: 9053 - protein, 19 aa, Artificial Sequence
  Cyclic GFR-binding peptide
VVNNAADLYLISIPELRAP

SEQ ID NO: 9054 - protein, 24 aa, Artificial Sequence
  Cyclic GFR-binding peptide
  MOD_RES (18)..(19): Xaa is C or S
TRGVLYLISIPELDQPVXXPSASA

SEQ ID NO: 9055 - protein, 19 aa, Artificial Sequence
  Cyclic GFR-binding peptide
VKPKRGVLYLISIPELAQP

SEQ ID NO: 9056 - protein, 19 aa, Artificial Sequence
  Cyclic GFR-binding peptide
  MOD_RES (14)..(15): Xaa is C or S
LYLISIPELDQPVXXPSAS

SEQ ID NO: 9057 - protein, 20 aa, Artificial Sequence
  Cyclic GFR-binding peptide
  MOD_RES (14)..(15): Xaa is C or S
LYLVSIPELKTPVXXAKGVK

SEQ ID NO: 9058 - protein, 20 aa, Artificial Sequence
  Cyclic GFR-binding peptide
  MOD_RES (14)..(15): Xaa is C or S
IYLVSIPSLQTPAXXPKPVT

SEQ ID NO: 9059 - protein, 17 aa, Artificial Sequence
  Cyclic GFR-binding peptide
  MOD_RES (14)..(15): Xaa is C or S
LYLISIPELAQPVXXPA

SEQ ID NO: 9060 - protein, 14 aa, Artificial Sequence
  Cyclic GFR-binding peptide
  MOD_RES (14)..(14): Xaa is C or S
IYLVSIPSLKTPVX

SEQ ID NO: 9061 - protein, 24 aa, Artificial Sequence
  Cyclic GFR-binding peptide
  MOD_RES (18)..(19): Xaa is C or S
NAADKYLISIPSLRAPVXXSAPAA

SEQ ID NO: 9062 - protein, 23 aa, Artificial Sequence
  Cyclic GFR-binding peptide
  MOD_RES (17)..(18): Xaa is C or S
GKDKYLISIPSLKTPVXXAKSAK

SEQ ID NO: 9063 - protein, 24 aa, Artificial Sequence
  Cyclic GFR-binding peptide
  MOD_RES (18)..(19): Xaa is C or S
NAADLYLISIPELRAPVXXSAPAA

SEQ ID NO: 9064 - protein, 21 aa, Artificial Sequence
  Cyclic GFR-binding peptide
  MOD_RES (15)..(16): Xaa is C or S
DFYLISIANLKTPVXXAKSAK

SEQ ID NO: 9065 - protein, 27 aa, Artificial Sequence
  Cyclic GFR-binding peptide
  MOD_RES (21)..(21): Xaa is C or S
IVNSSDDLYLVSIPELKTPAXTPKTVH

SEQ ID NO: 9066 - protein, 20 aa, Artificial Sequence
  Cyclic GFR-binding peptide
  MOD_RES (14)..(15): Xaa is C or S
IYLVSIPSLKTPAXXAKPVA

SEQ ID NO: 9067 - protein, 17 aa, Artificial Sequence
  Cyclic GFR-binding peptide
IVNSSDDLYLVSIPELK

SEQ ID NO: 9068 - protein, 17 aa, Artificial Sequence
  Cyclic GFR-binding peptide
IVNSSDDLYLVSIPELQ

SEQ ID NO: 9069 - protein, 20 aa, Artificial Sequence
  Cyclic GFR-binding peptide
  MOD_RES (14)..(15): Xaa is C or S
LYLVSIPELQTPAXXPKPVT

SEQ ID NO: 9070 - protein, 19 aa, Artificial Sequence
  Cyclic GFR-binding peptide
  MOD_RES (14)..(15): Xaa is C or S
LYLVSIPELQTPAXXPKPV

SEQ ID NO: 9071 - protein, 23 aa, Artificial Sequence
  Cyclic GFR-binding peptide
  MOD_RES (17)..(17): Xaa is C or S
SDDIYLVSIPSLKTPAXTPKTVH

SEQ ID NO: 9072 - protein, 19 aa, Artificial Sequence
  Cyclic GFR-binding peptide
  MOD_RES (14)..(15): Xaa is C or S
IYLISIPSLDQSVXXPSAS

SEQ ID NO: 9073 - protein, 16 aa, Artificial Sequence
  Cyclic GFR-binding peptide
IVNNSSDIYLVSIPSL

SEQ ID NO: 9074 - protein, 22 aa, Artificial Sequence
  Cyclic GFR-binding peptide
  MOD_RES (16)..(16): Xaa is C or S
DDIYLVSIPSLKTPAXTPKTVH

SEQ ID NO: 9075 - protein, 15 aa, Artificial Sequence
  Cyclic GFR-binding peptide
IVNNSSDLYLVSIPE

SEQ ID NO: 9076 - protein, 23 aa, Artificial Sequence
  Cyclic GFR-binding peptide
  MOD_RES (17)..(18): Xaa is C or S
SDDLYLVSIPELKTPAXXPKPVY

SEQ ID NO: 9077 - protein, 22 aa, Artificial Sequence
  Cyclic GFR-binding peptide
  MOD_RES (16)..(17): Xaa is C or S
EDLYLMSIPELETPVXXAKPIK

SEQ ID NO: 9078 - protein, 17 aa, Artificial Sequence
  Cyclic GFR-binding peptide
IVNNSSDIYLVSIPSLK

SEQ ID NO: 9079 - protein, 13 aa, Artificial Sequence
  Cyclic GFR-binding peptide
FYLISIANLKTPV

SEQ ID NO: 9080 - protein, 25 aa, Artificial Sequence
  Cyclic GFR-binding peptide
  MOD_RES (19)..(20): Xaa is C or S
NSSDDLYLVSIPELKTPAXXPKPVY

SEQ ID NO: 9081 - protein, 15 aa, Artificial Sequence
  Cyclic GFR-binding peptide
  MOD_RES (14)..(15): Xaa is C or S
FYLISIANLKTPVXX

SEQ ID NO: 9082 - protein, 16 aa, Artificial Sequence
  Cyclic GFR-binding peptide
VVNNAADLYLISIPEL

SEQ ID NO: 9083 - protein, 18 aa, Artificial Sequence
  Cyclic GFR-binding peptide
YTVVGKDKYLISIPSLKT

SEQ ID NO: 9084 - protein, 27 aa, Artificial Sequence
  Cyclic GFR-binding peptide
  MOD_RES (21)..(22): Xaa is C or S
VKPKRGVLYLISIPELAQPVXXPAASA

SEQ ID NO: 9085 - protein, 15 aa, Artificial Sequence
  Cyclic GFR-binding peptide
YTVVGKDFYLISIAN

SEQ ID NO: 9086 - protein, 25 aa, Artificial Sequence
  Cyclic GFR-binding peptide
  MOD_RES (19)..(20): Xaa is C or S
PTRGVLYLISIPELDQPVXXPSASA

SEQ ID NO: 9087 - protein, 22 aa, Artificial Sequence
  Cyclic GFR-binding peptide
  MOD_RES (16)..(17): Xaa is C or S
EDIYLMSIPSLETPVXXAKPIS

SEQ ID NO: 9088 - protein, 22 aa, Artificial Sequence
  Cyclic GFR-binding peptide
  MOD_RES (16)..(17): Xaa is C or S
GVLYLISIPELAQPVXXPAASA

SEQ ID NO: 9089 - protein, 20 aa, Artificial Sequence
  Cyclic GFR-binding peptide
  MOD_RES (14)..(15): Xaa is C or S
IYLISIPSLDQPVXXPSASA

SEQ ID NO: 9090 - protein, 25 aa, Artificial Sequence
  Cyclic GFR-binding peptide
  MOD_RES (19)..(20): Xaa is C or S
VGMDDIYLVSIPSLKTPVXXAKGVK

SEQ ID NO: 9091 - protein, 17 aa, Artificial Sequence
  Cyclic GFR-binding peptide
  MOD_RES (14)..(15): Xaa is C or S
LYLVSIPELKTPVXXAK

SEQ ID NO: 9092 - protein, 25 aa, Artificial Sequence
  Cyclic GFR-binding peptide
  MOD_RES (19)..(20): Xaa is C or S
PTRGVIYLISIPSLDQPVXXPSASA

SEQ ID NO: 9093 - protein, 26 aa, Artificial Sequence
  Cyclic GFR-binding peptide
  MOD_RES (20)..(21): Xaa is C or S
TVVGKDKYLISIPSLKTPVXXAKSAK

SEQ ID NO: 9094 - protein, 14 aa, Artificial Sequence
  Cyclic GFR-binding peptide
  MOD_RES (14)..(14): Xaa is C or S
LYLISIPELAQPVX

SEQ ID NO: 9095 - protein, 27 aa, Artificial Sequence
  Cyclic GFR-binding peptide
  MOD_RES (21)..(22): Xaa is C or S
VVNNAADKYLISIPSLRAPVXXSAPAA

SEQ ID NO: 9096 - protein, 18 aa, Artificial Sequence
  Cyclic GFR-binding peptide
  MOD_RES (14)..(14): Xaa is C or S
LYLVSIPELKTPAXTPKT

SEQ ID NO: 9097 - protein, 17 aa, Artificial Sequence
  Cyclic GFR-binding peptide
IKPTKGILYLISIPELD

SEQ ID NO: 9098 - protein, 19 aa, Artificial Sequence
  Cyclic GFR-binding peptide
IVNSSDDLYLVSIPELQTP

SEQ ID NO: 9099 - protein, 17 aa, Artificial Sequence
  Cyclic GFR-binding peptide
  MOD_RES (14)..(15): Xaa is C or S
LYLVSIPELQTPAXXPK

SEQ ID NO: 9100 - protein, 24 aa, Artificial Sequence
  Cyclic GFR-binding peptide
  MOD_RES (18)..(19): Xaa is C or S
NSSDIYLVSIPSLKTPAXXAKPVA

SEQ ID NO: 9101 - protein, 26 aa, Artificial Sequence
  Cyclic GFR-binding peptide
  MOD_RES (20)..(21): Xaa is C or S
VNSSDDIYLVSIPSLKTPAXXPKPVY

SEQ ID NO: 9102 - protein, 16 aa, Artificial Sequence
  Cyclic GFR-binding peptide
IVNSSDDLYLVSIPEL

SEQ ID NO: 9103 - protein, 27 aa, Artificial Sequence
  Cyclic GFR-binding peptide
  MOD_RES (21)..(22): Xaa is C or S
VVKDYEDLYLMSIPELETPVXXAKPIS

SEQ ID NO: 9104 - protein, 18 aa, Artificial Sequence
  Cyclic GFR-binding peptide
VKPTRGVIYLISIPSLDQ

SEQ ID NO: 9105 - protein, 19 aa, Artificial Sequence
  Cyclic GFR-binding peptide
IVNNSSDIYLVSIPSLKTP

SEQ ID NO: 9106 - protein, 23 aa, Artificial Sequence
  Cyclic GFR-binding peptide
  MOD_RES (17)..(18): Xaa is C or S
AADLYLISIPELRAPVXXSAPAA

SEQ ID NO: 9107 - protein, 16 aa, Artificial Sequence
  Cyclic GFR-binding peptide
  MOD_RES (14)..(15): Xaa is C or S
LYLMSIPELETPVXXA

SEQ ID NO: 9108 - protein, 24 aa, Artificial Sequence
  Cyclic GFR-binding peptide
  MOD_RES (18)..(19): Xaa is C or S
NSSDLYLVSIPELKTPAXXAKPVA

SEQ ID NO: 9109 - protein, 23 aa, Artificial Sequence
  Cyclic GFR-binding peptide
  MOD_RES (17)..(18): Xaa is C or S
KGILYLISIPELDQSVXXPSASA

SEQ ID NO: 9110 - protein, 15 aa, Artificial Sequence
  Cyclic GFR-binding peptide
VVKDYEDIYLMSIPS

SEQ ID NO: 9111 - protein, 22 aa, Artificial Sequence
  Cyclic GFR-binding peptide
  MOD_RES (16)..(17): Xaa is C or S
GVIYLISIPSLAQPVXXPAASA

SEQ ID NO: 9112 - protein, 21 aa, Artificial Sequence
  Cyclic GFR-binding peptide
  MOD_RES (15)..(16): Xaa is C or S
DIYLISIPSLKTPVXXAKSAK

SEQ ID NO: 9113 - protein, 13 aa, Artificial Sequence
  Cyclic GFR-binding peptide
LYLVSIPELQTPA

SEQ ID NO: 9114 - protein, 14 aa, Artificial Sequence
  Cyclic GFR-binding peptide
  MOD_RES (14)..(14): Xaa is C or S
LYLISIPELDQPVX

SEQ ID NO: 9115 - protein, 19 aa, Artificial Sequence
  Cyclic GFR-binding peptide
  MOD_RES (14)..(15): Xaa is C or S
LYLVSIPELKTPAXXAKPV

SEQ ID NO: 9116 - protein, 15 aa, Artificial Sequence
  Cyclic GFR-binding peptide
  MOD_RES (14)..(15): Xaa is C or S
LYLVSIPELQTPAXX

SEQ ID NO: 9117 - protein, 21 aa, Artificial Sequence
  Cyclic GFR-binding peptide
  MOD_RES (15)..(16): Xaa is C or S
VIYLISIPSLAQPVXXPAASA

SEQ ID NO: 9118 - protein, 26 aa, Artificial Sequence
  Cyclic GFR-binding peptide
  MOD_RES (20)..(21): Xaa is C or S
VNNSSDLYLVSIPELKTPAXXAKPVA

SEQ ID NO: 9119 - protein, 20 aa, Artificial Sequence
  Cyclic GFR-binding peptide
  MOD_RES (14)..(15): Xaa is C or S
KYLISIPSLKTPVXXAKSAK

SEQ ID NO: 9120 - protein, 20 aa, Artificial Sequence
  Cyclic GFR-binding peptide
  MOD_RES (14)..(15): Xaa is C or S
IYLISIPSLKTPVXXAKSAK

SEQ ID NO: 9121 - protein, 13 aa, Artificial Sequence
  Cyclic GFR-binding peptide
LYLISIPELRAPV

SEQ ID NO: 9122 - protein, 15 aa, Artificial Sequence
  Cyclic GFR-binding peptide
  MOD_RES (14)..(15): Xaa is C or S
IYLVSIPSLKTPAXX

SEQ ID NO: 9123 - protein, 19 aa, Artificial Sequence
  Cyclic GFR-binding peptide
  MOD_RES (14)..(15): Xaa is C or S
LYLISIPELRAPVXXSAPA

SEQ ID NO: 9124 - protein, 16 aa, Artificial Sequence
  Cyclic GFR-binding peptide
  MOD_RES (14)..(15): Xaa is C or S
IYLVSIPSLKTPAXXP

SEQ ID NO: 9125 - protein, 22 aa, Artificial Sequence
  Cyclic GFR-binding peptide
  MOD_RES (16)..(17): Xaa is C or S
DDLYLVSIPELKTPAXXPKPVY

SEQ ID NO: 9126 - protein, 19 aa, Artificial Sequence
  Cyclic GFR-binding peptide
  MOD_RES (14)..(15): Xaa is C or S
IYLISIPSLAQPVXXPAAS

SEQ ID NO: 9127 - protein, 18 aa, Artificial Sequence
  Cyclic GFR-binding peptide
  MOD_RES (14)..(15): Xaa is C or S
LYLMSIPELETPVXXAKP

SEQ ID NO: 9128 - protein, 17 aa, Artificial Sequence
  Cyclic GFR-binding peptide
VKPTRGVIYLISIPSLD

SEQ ID NO: 9129 - protein, 21 aa, Artificial Sequence
  Cyclic GFR-binding peptide
  MOD_RES (15)..(16): Xaa is C or S
DKYLISIPSLRAPVXXSAPAA

SEQ ID NO: 9130 - protein, 13 aa, Artificial Sequence
  Cyclic GFR-binding peptide
IYLISIPSLDQPV

SEQ ID NO: 9131 - protein, 14 aa, Artificial Sequence
  Cyclic GFR-binding peptide
  MOD_RES (14)..(14): Xaa is C or S
IYLVSIPSLQTPAX

SEQ ID NO: 9132 - protein, 15 aa, Artificial Sequence
  Cyclic GFR-binding peptide
  MOD_RES (14)..(15): Xaa is C or S
IYLVSIPSLKTPVXX

SEQ ID NO: 9133 - protein, 15 aa, Artificial Sequence
  Cyclic GFR-binding peptide
TPVGMDDIYLVSIPS

SEQ ID NO: 9134 - protein, 22 aa, Artificial Sequence
  Cyclic GFR-binding peptide
  MOD_RES (16)..(17): Xaa is C or S
DDLYLVSIPELQTPAXXPKPVT

SEQ ID NO: 9135 - protein, 18 aa, Artificial Sequence
  Cyclic GFR-binding peptide
VKPKRGVLYLISIPELAQ

SEQ ID NO: 9136 - protein, 16 aa, Artificial Sequence
  Cyclic GFR-binding peptide
IKPTKGILYLISIPEL

SEQ ID NO: 9137 - protein, 18 aa, Artificial Sequence
  Cyclic GFR-binding peptide
  MOD_RES (14)..(15): Xaa is C or S
LYLVSIPELKTPAXXPKP

SEQ ID NO: 9138 - protein, 20 aa, Artificial Sequence
  Cyclic GFR-binding peptide
  MOD_RES (14)..(15): Xaa is C or S
IYLMSIPSLETPVXXAKPIS

SEQ ID NO: 9139 - protein, 23 aa, Artificial Sequence
  Cyclic GFR-binding peptide
  MOD_RES (17)..(18): Xaa is C or S
YEDLYLMSIPELETPVXXAKPIS

SEQ ID NO: 9140 - protein, 24 aa, Artificial Sequence
  Cyclic GFR-binding peptide
  MOD_RES (18)..(19): Xaa is C or S
KRGVLYLISIPELAQPVXXPAASA

SEQ ID NO: 9141 - protein, 18 aa, Artificial Sequence
  Cyclic GFR-binding peptide
  MOD_RES (14)..(15): Xaa is C or S
LYLVSIPELKTPVXXAKG

SEQ ID NO: 9142 - protein, 19 aa, Artificial Sequence
  Cyclic GFR-binding peptide
  MOD_RES (14)..(15): Xaa is C or S
IYLISIPSLDQPVXXPSAS

SEQ ID NO: 9143 - protein, 20 aa, Artificial Sequence
  Cyclic GFR-binding peptide
  MOD_RES (14)..(15): Xaa is C or S
FYLISIANLKTPVXXAKSAK

SEQ ID NO: 9144 - protein, 22 aa, Artificial Sequence
  Cyclic GFR-binding peptide
  MOD_RES (16)..(17): Xaa is C or S
DDIYLVSIPSLKTPAXXPKPVY

SEQ ID NO: 9145 - protein, 20 aa, Artificial Sequence
  Cyclic GFR-binding peptide
  MOD_RES (14)..(15): Xaa is C or S
IYLVSIPSLKTPAXXPKPVY

SEQ ID NO: 9146 - protein, 16 aa, Artificial Sequence
  Cyclic GFR-binding peptide
  MOD_RES (14)..(15): Xaa is C or S
FYLISIANLKTPVXXA

SEQ ID NO: 9147 - protein, 16 aa, Artificial Sequence
  Cyclic GFR-binding peptide
VVKENEDIYLMSIPSL

SEQ ID NO: 9148 - protein, 15 aa, Artificial Sequence
  Cyclic GFR-binding peptide
VVKDYEDLYLMSIPE

SEQ ID NO: 9149 - protein, 25 aa, Artificial Sequence
  Cyclic GFR-binding peptide
  MOD_RES (19)..(20): Xaa is C or S
PTKGIIYLISIPSLDQSVXXPSASA

SEQ ID NO: 9150 - protein, 17 aa, Artificial Sequence
  Cyclic GFR-binding peptide
  MOD_RES (14)..(15): Xaa is C or S
FYLISIANLRAPVXXSA

SEQ ID NO: 9151 - protein, 23 aa, Artificial Sequence
  Cyclic GFR-binding peptide
  MOD_RES (17)..(18): Xaa is C or S
SSDIYLVSIPSLKTPAXXAKPVA

SEQ ID NO: 9152 - protein, 24 aa, Artificial Sequence
  Cyclic GFR-binding peptide
  MOD_RES (18)..(19): Xaa is C or S
TRGVIYLISIPSLDQPVXXPSASA

SEQ ID NO: 9153 - protein, 19 aa, Artificial Sequence
  Cyclic GFR-binding peptide
  MOD_RES (14)..(15): Xaa is C or S
IYLVSIPSLQTPAXXPKPV

SEQ ID NO: 9154 - protein, 19 aa, Artificial Sequence
  Cyclic GFR-binding peptide
  MOD_RES (14)..(15): Xaa is C or S
FYLISIANLKTPVXXAKSA

SEQ ID NO: 9155 - protein, 22 aa, Artificial Sequence
  Cyclic GFR-binding peptide
  MOD_RES (16)..(17): Xaa is C or S
DDIYLVSIPSLQTPAXXPKPVT

SEQ ID NO: 9156 - protein, 25 aa, Artificial Sequence
  Cyclic GFR-binding peptide
  MOD_RES (19)..(20): Xaa is C or S
NNSSDLYLVSIPELKTPAXXAKPVA

SEQ ID NO: 9157 - protein, 24 aa, Artificial Sequence
  Cyclic GFR-binding peptide
  MOD_RES (18)..(19): Xaa is C or S
GMDDIYLVSIPSLKTPVXXAKGVK

SEQ ID NO: 9158 - protein, 19 aa, Artificial Sequence
  Cyclic GFR-binding peptide
  MOD_RES (14)..(15): Xaa is C or S
IYLVSIPSLKTPAXXPKPV

SEQ ID NO: 9159 - protein, 17 aa, Artificial Sequence
  Cyclic GFR-binding peptide
  MOD_RES (14)..(15): Xaa is C or S
IYLVSIPSLKTPVXXAK

SEQ ID NO: 9160 - protein, 16 aa, Artificial Sequence
  Cyclic GFR-binding peptide
  MOD_RES (14)..(14): Xaa is C or S
IYLVSIPSLKTPAXTP

SEQ ID NO: 9161 - protein, 19 aa, Artificial Sequence
  Cyclic GFR-binding peptide
IVNSSDDIYLVSIPSLKTP

SEQ ID NO: 9162 - protein, 25 aa, Artificial Sequence
  Cyclic GFR-binding peptide
  MOD_RES (19)..(20): Xaa is C or S
NNAADLYLISIPELRAPVXXSAPAA

SEQ ID NO: 9163 - protein, 27 aa, Artificial Sequence
  Cyclic GFR-binding peptide
  MOD_RES (21)..(22): Xaa is C or S
TPVGMDDLYLVSIPELKTPVXXAKGVK

SEQ ID NO: 9164 - protein, 27 aa, Artificial Sequence
  Cyclic GFR-binding peptide
  MOD_RES (21)..(22): Xaa is C or S
VVNNAADFYLISIANLRAPVXXSAPAA

SEQ ID NO: 9165 - protein, 19 aa, Artificial Sequence
  Cyclic GFR-binding peptide
IVNSSDDIYLVSIPSLQTP

SEQ ID NO: 9166 - protein, 25 aa, Artificial Sequence
  Cyclic GFR-binding peptide
  MOD_RES (19)..(19): Xaa is C or S
NSSDDIYLVSIPSLKTPAXTPKTVH

SEQ ID NO: 9167 - protein, 15 aa, Artificial Sequence
  Cyclic GFR-binding peptide
  MOD_RES (14)..(15): Xaa is C or S
LYLISIPELAQPVXX

SEQ ID NO: 9168 - protein, 13 aa, Artificial Sequence
  Cyclic GFR-binding peptide
IYLISIPSLDQSV

SEQ ID NO: 9169 - protein, 24 aa, Artificial Sequence
  Cyclic GFR-binding peptide
  MOD_RES (18)..(18): Xaa is C or S
SSDDLYLVSIPELKTPAXTPKTVH

SEQ ID NO: 9170 - protein, 20 aa, Artificial Sequence
  Cyclic GFR-binding peptide
  MOD_RES (14)..(15): Xaa is C or S
IYLISIPSLDQSVXXPSASA

SEQ ID NO: 9171 - protein, 17 aa, Artificial Sequence
  Cyclic GFR-binding peptide
TPVGMDDIYLVSIPSLK

SEQ ID NO: 9172 - protein, 21 aa, Artificial Sequence
  Cyclic GFR-binding peptide
  MOD_RES (15)..(16): Xaa is C or S
DIYLVSIPSLQTPAXXPKPVT

SEQ ID NO: 9173 - protein, 16 aa, Artificial Sequence
  Cyclic GFR-binding peptide
VVKDYEDIYLMSIPSL

SEQ ID NO: 9174 - protein, 21 aa, Artificial Sequence
  Cyclic GFR-binding peptide
  MOD_RES (15)..(16): Xaa is C or S
DIYLMSIPSLETPVXXAKPIS

SEQ ID NO: 9175 - protein, 16 aa, Artificial Sequence
  Cyclic GFR-binding peptide
  MOD_RES (14)..(15): Xaa is C or S
IYLVSIPSLQTPAXXP

SEQ ID NO: 9176 - protein, 18 aa, Artificial Sequence
  Cyclic GFR-binding peptide
IKPTKGIIYLISIPSLDQ

SEQ ID NO: 9177 - protein, 18 aa, Artificial Sequence
  Cyclic GFR-binding peptide
  MOD_RES (14)..(15): Xaa is C or S
LYLISIPELAQPVXXPAA

SEQ ID NO: 9178 - protein, 15 aa, Artificial Sequence
  Cyclic GFR-binding peptide
  MOD_RES (14)..(15): Xaa is C or S
IYLISIPSLKTPVXX

SEQ ID NO: 9179 - protein, 15 aa, Artificial Sequence
  Cyclic GFR-binding peptide
  MOD_RES (14)..(15): Xaa is C or S
KYLISIPSLKTPVXX

SEQ ID NO: 9180 - protein, 21 aa, Artificial Sequence
  Cyclic GFR-binding peptide
  MOD_RES (15)..(16): Xaa is C or S
DFYLISIANLRAPVXXSAPAA

SEQ ID NO: 9181 - protein, 24 aa, Artificial Sequence
  Cyclic GFR-binding peptide
  MOD_RES (18)..(19): Xaa is C or S
DYEDIYLMSIPSLETPVXXAKPIS

SEQ ID NO: 9182 - protein, 17 aa, Artificial Sequence
  Cyclic GFR-binding peptide
  MOD_RES (14)..(15): Xaa is C or S
LYLISIPELDQPVXXPS

SEQ ID NO: 9183 - protein, 22 aa, Artificial Sequence
  Cyclic GFR-binding peptide
  MOD_RES (16)..(16): Xaa is C or S
DDLYLVSIPELKTPAXTPKTVH

SEQ ID NO: 9184 - protein, 16 aa, Artificial Sequence
  Cyclic GFR-binding peptide
VKPKRGVLYLISIPEL

SEQ ID NO: 9185 - protein, 25 aa, Artificial Sequence
  Cyclic GFR-binding peptide
  MOD_RES (19)..(20): Xaa is C or S
NNSSDIYLVSIPSLKTPAXXAKPVA

SEQ ID NO: 9186 - protein, 19 aa, Artificial Sequence
  Cyclic GFR-binding peptide
VKPTRGVIYLISIPSLDQP

SEQ ID NO: 9187 - protein, 27 aa, Artificial Sequence
  Cyclic GFR-binding peptide
  MOD_RES (21)..(22): Xaa is C or S
IVNSSDDLYLVSIPELQTPAXXPKPVT

SEQ ID NO: 9188 - protein, 25 aa, Artificial Sequence
  Cyclic GFR-binding peptide
  MOD_RES (19)..(20): Xaa is C or S
VVGKDKYLISIPSLKTPVXXAKSAK

SEQ ID NO: 9189 - protein, 23 aa, Artificial Sequence
  Cyclic GFR-binding peptide
  MOD_RES (17)..(18): Xaa is C or S
RGVIYLISIPSLAQPVXXPAASA

SEQ ID NO: 9190 - protein, 14 aa, Artificial Sequence
  Cyclic GFR-binding peptide
  MOD_RES (14)..(14): Xaa is C or S
LYLMSIPELETPVX

SEQ ID NO: 9191 - protein, 18 aa, Artificial Sequence
  Cyclic GFR-binding peptide
VVNNAADKYLISIPSLRA

SEQ ID NO: 9192 - protein, 17 aa, Artificial Sequence
  Cyclic GFR-binding peptide
VVKDYEDLYLMSIPELE

SEQ ID NO: 9193 - protein, 16 aa, Artificial Sequence
  Cyclic GFR-binding peptide
  MOD_RES (14)..(15): Xaa is C or S
LYLISIPELDQSVXXP

SEQ ID NO: 9194 - protein, 14 aa, Artificial Sequence
  Cyclic GFR-binding peptide
  MOD_RES (14)..(14): Xaa is C or S
IYLVSIPSLKTPAX

SEQ ID NO: 9195 - protein, 16 aa, Artificial Sequence
  Cyclic GFR-binding peptide
  MOD_RES (14)..(15): Xaa is C or S
LYLISIPELAQPVXXP

SEQ ID NO: 9196 - protein, 20 aa, Artificial Sequence
  Cyclic GFR-binding peptide
  MOD_RES (14)..(15): Xaa is C or S
LYLISIPELDQPVXXPSASA

SEQ ID NO: 9197 - protein, 22 aa, Artificial Sequence
  Cyclic GFR-binding peptide
  MOD_RES (16)..(17): Xaa is C or S
KDKYLISIPSLKTPVXXAKSAK

SEQ ID NO: 9198 - protein, 14 aa, Artificial Sequence
  Cyclic GFR-binding peptide
  MOD_RES (14)..(14): Xaa is C or S
LYLVSIPELKTPVX

SEQ ID NO: 9199 - protein, 19 aa, Artificial Sequence
  Cyclic GFR-binding peptide
VVKENEDIYLMSIPSLETP

SEQ ID NO: 9200 - protein, 16 aa, Artificial Sequence
  Cyclic GFR-binding peptide
  MOD_RES (14)..(15): Xaa is C or S
LYLVSIPELKTPAXXA

SEQ ID NO: 9201 - protein, 17 aa, Artificial Sequence
  Cyclic GFR-binding peptide
  MOD_RES (14)..(15): Xaa is C or S
IYLVSIPSLKTPAXXAK

SEQ ID NO: 9202 - protein, 24 aa, Artificial Sequence
  Cyclic GFR-binding peptide
  MOD_RES (18)..(19): Xaa is C or S
ENEDIYLMSIPSLETPVXXAKPIK

SEQ ID NO: 9203 - protein, 13 aa, Artificial Sequence
  Cyclic GFR-binding peptide
IYLISIPSLAQPV

SEQ ID NO: 9204 - protein, 15 aa, Artificial Sequence
  Cyclic GFR-binding peptide
  MOD_RES (14)..(15): Xaa is C or S
IYLVSIPSLQTPAXX

SEQ ID NO: 9205 - protein, 17 aa, Artificial Sequence
  Cyclic GFR-binding peptide
VVNNAADLYLISIPELR

SEQ ID NO: 9206 - protein, 16 aa, Artificial Sequence
  Cyclic GFR-binding peptide
YTVVGKDFYLISIANL

SEQ ID NO: 9207 - protein, 27 aa, Artificial Sequence
  Cyclic GFR-binding peptide
  MOD_RES (21)..(22): Xaa is C or S
IVNSSDDIYLVSIPSLKTPAXXPKPVY

SEQ ID NO: 9208 - protein, 21 aa, Artificial Sequence
  Cyclic GFR-binding peptide
  MOD_RES (15)..(16): Xaa is C or S
VLYLISIPELAQPVXXPAASA

SEQ ID NO: 9209 - protein, 15 aa, Artificial Sequence
  Cyclic GFR-binding peptide
  MOD_RES (14)..(15): Xaa is C or S
LYLISIPELDQSVXX

SEQ ID NO: 9210 - protein, 18 aa, Artificial Sequence
  Cyclic GFR-binding peptide
  MOD_RES (14)..(15): Xaa is C or S
LYLISIPELRAPVXXSAP

SEQ ID NO: 9211 - protein, 19 aa, Artificial Sequence
  Cyclic GFR-binding peptide
  MOD_RES (14)..(14): Xaa is C or S
IYLVSIPSLKTPAXTPKTV

SEQ ID NO: 9212 - protein, 22 aa, Artificial Sequence
  Cyclic GFR-binding peptide
  MOD_RES (16)..(17): Xaa is C or S
KDFYLISIANLKTPVXXAKSAK

SEQ ID NO: 9213 - protein, 18 aa, Artificial Sequence
  Cyclic GFR-binding peptide
  MOD_RES (14)..(15): Xaa is C or S
IYLVSIPSLKTPAXXAKP

SEQ ID NO: 9214 - protein, 22 aa, Artificial Sequence
  Cyclic GFR-binding peptide
  MOD_RES (16)..(17): Xaa is C or S
GILYLISIPELDQSVXXPSASA

SEQ ID NO: 9215 - protein, 18 aa, Artificial Sequence
  Cyclic GFR-binding peptide
VVNNAADFYLISIANLRA

SEQ ID NO: 9216 - protein, 20 aa, Artificial Sequence
  Cyclic GFR-binding peptide
  MOD_RES (14)..(15): Xaa is C or S
IYLMSIPSLETPVXXAKPIK

SEQ ID NO: 9217 - protein, 18 aa, Artificial Sequence
  Cyclic GFR-binding peptide
  MOD_RES (14)..(15): Xaa is C or S
FYLISIANLKTPVXXAKS

SEQ ID NO: 9218 - protein, 27 aa, Artificial Sequence
  Cyclic GFR-binding peptide
  MOD_RES (21)..(22): Xaa is C or S
IVNNSSDIYLVSIPSLKTPAXXAKPVA

SEQ ID NO: 9219 - protein, 18 aa, Artificial Sequence
  Cyclic GFR-binding peptide
TPVGMDDLYLVSIPELKT

SEQ ID NO: 9220 - protein, 15 aa, Artificial Sequence
  Cyclic GFR-binding peptide
VVNNAADLYLISIPE

SEQ ID NO: 9221 - protein, 23 aa, Artificial Sequence
  Cyclic GFR-binding peptide
  MOD_RES (17)..(18): Xaa is C or S
GKDFYLISIANLKTPVXXAKSAK

SEQ ID NO: 9222 - protein, 21 aa, Artificial Sequence
  Cyclic GFR-binding peptide
  MOD_RES (15)..(16): Xaa is C or S
DLYLMSIPELETPVXXAKPIK

SEQ ID NO: 9223 - protein, 19 aa, Artificial Sequence
  Cyclic GFR-binding peptide
YTVVGKDKYLISIPSLKTP

SEQ ID NO: 9224 - protein, 19 aa, Artificial Sequence
  Cyclic GFR-binding peptide
  MOD_RES (14)..(15): Xaa is C or S
IYLVSIPSLKTPVXXAKGV

SEQ ID NO: 9225 - protein, 27 aa, Artificial Sequence
  Cyclic GFR-binding peptide
  MOD_RES (21)..(22): Xaa is C or S
VVKENEDIYLMSIPSLETPVXXAKPIK

SEQ ID NO: 9226 - protein, 25 aa, Artificial Sequence
  Cyclic GFR-binding peptide
  MOD_RES (19)..(19): Xaa is C or S
NSSDDLYLVSIPELKTPAXTPKTVH

SEQ ID NO: 9227 - protein, 19 aa, Artificial Sequence
  Cyclic GFR-binding peptide
  MOD_RES (14)..(15): Xaa is C or S
LYLMSIPELETPVXXAKPI

SEQ ID NO: 9228 - protein, 20 aa, Artificial Sequence
  Cyclic GFR-binding peptide
  MOD_RES (14)..(14): Xaa is C or S
IYLVSIPSLKTPAXTPKTVH

SEQ ID NO: 9229 - protein, 23 aa, Artificial Sequence
  Cyclic GFR-binding peptide
  MOD_RES (17)..(18): Xaa is C or S
KGIIYLISIPSLDQSVXXPSASA

SEQ ID NO: 9230 - protein, 22 aa, Artificial Sequence
  Cyclic GFR-binding peptide
  MOD_RES (16)..(17): Xaa is C or S
KDIYLISIPSLKTPVXXAKSAK

SEQ ID NO: 9231 - protein, 17 aa, Artificial Sequence
  Cyclic GFR-binding peptide
  MOD_RES (14)..(15): Xaa is C or S
KYLISIPSLKTPVXXAK

SEQ ID NO: 9232 - protein, 17 aa, Artificial Sequence
  Cyclic GFR-binding peptide
  MOD_RES (14)..(15): Xaa is C or S
IYLISIPSLKTPVXXAK

SEQ ID NO: 9233 - protein, 16 aa, Artificial Sequence
  Cyclic GFR-binding peptide
YTVVGKDKYLISIPSL

SEQ ID NO: 9234 - protein, 22 aa, Artificial Sequence
  Cyclic GFR-binding peptide
  MOD_RES (16)..(17): Xaa is C or S
GIIYLISIPSLDQSVXXPSASA

SEQ ID NO: 9235 - protein, 22 aa, Artificial Sequence
  Cyclic GFR-binding peptide
  MOD_RES (16)..(17): Xaa is C or S
SDIYLVSIPSLKTPAXXAKPVA

SEQ ID NO: 9236 - protein, 21 aa, Artificial Sequence
  Cyclic GFR-binding peptide
  MOD_RES (15)..(16): Xaa is C or S
IIYLISIPSLDQSVXXPSASA

SEQ ID NO: 9237 - protein, 18 aa, Artificial Sequence
  Cyclic GFR-binding peptide
  MOD_RES (14)..(15): Xaa is C or S
IYLISIPSLDQSVXXPSA

SEQ ID NO: 9238 - protein, 26 aa, Artificial Sequence
  Cyclic GFR-binding peptide
  MOD_RES (20)..(21): Xaa is C or S
VNNAADFYLISIANLRAPVXXSAPAA

SEQ ID NO: 9239 - protein, 15 aa, Artificial Sequence
  Cyclic GFR-binding peptide
  MOD_RES (14)..(15): Xaa is C or S
LYLVSIPELKTPAXX

SEQ ID NO: 9240 - protein, 21 aa, Artificial Sequence
  Cyclic GFR-binding peptide
  MOD_RES (15)..(16): Xaa is C or S
DLYLISIPELRAPVXXSAPAA

SEQ ID NO: 9241 - protein, 15 aa, Artificial Sequence
  Cyclic GFR-binding peptide
VVKENEDLYLMSIPE

SEQ ID NO: 9242 - protein, 21 aa, Artificial Sequence
  Cyclic GFR-binding peptide
  MOD_RES (15)..(16): Xaa is C or S
DIYLVSIPSLKTPVXXAKGVK

SEQ ID NO: 9243 - protein, 19 aa, Artificial Sequence
  Cyclic GFR-binding peptide
  MOD_RES (14)..(15): Xaa is C or S
LYLVSIPELKTPAXXPKPV

SEQ ID NO: 9244 - protein, 26 aa, Artificial Sequence
  Cyclic GFR-binding peptide
  MOD_RES (20)..(21): Xaa is C or S
VNNAADLYLISIPELRAPVXXSAPAA

SEQ ID NO: 9245 - protein, 23 aa, Artificial Sequence
  Cyclic GFR-binding peptide
  MOD_RES (17)..(17): Xaa is C or S
SDDLYLVSIPELKTPAXTPKTVH

SEQ ID NO: 9246 - protein, 17 aa, Artificial Sequence
  Cyclic GFR-binding peptide
  MOD_RES (14)..(15): Xaa is C or S
LYLISIPELRAPVXXSA

SEQ ID NO: 9247 - protein, 15 aa, Artificial Sequence
  Cyclic GFR-binding peptide
VKPTRGVIYLISIPS

SEQ ID NO: 9248 - protein, 18 aa, Artificial Sequence
  Cyclic GFR-binding peptide
  MOD_RES (14)..(15): Xaa is C or S
IYLMSIPSLETPVXXAKP

SEQ ID NO: 9249 - protein, 19 aa, Artificial Sequence
  Cyclic GFR-binding peptide
  MOD_RES (14)..(15): Xaa is C or S
LYLVSIPELKTPVXXAKGV

SEQ ID NO: 9250 - protein, 25 aa, Artificial Sequence
  Cyclic GFR-binding peptide
  MOD_RES (19)..(20): Xaa is C or S
PKRGVIYLISIPSLAQPVXXPAASA

SEQ ID NO: 9251 - protein, 24 aa, Artificial Sequence
  Cyclic GFR-binding peptide
  MOD_RES (18)..(19): Xaa is C or S
DYEDLYLMSIPELETPVXXAKPIS

SEQ ID NO: 9252 - protein, 24 aa, Artificial Sequence
  Cyclic GFR-binding peptide
  MOD_RES (18)..(19): Xaa is C or S
VGKDIYLISIPSLKTPVXXAKSAK

SEQ ID NO: 9253 - protein, 24 aa, Artificial Sequence
  Cyclic GFR-binding peptide
  MOD_RES (18)..(19): Xaa is C or S
TKGILYLISIPELDQSVXXPSASA

SEQ ID NO: 9254 - protein, 16 aa, Artificial Sequence
  Cyclic GFR-binding peptide
  MOD_RES (14)..(15): Xaa is C or S
LYLISIPELDQPVXXP

SEQ ID NO: 9255 - protein, 24 aa, Artificial Sequence
  Cyclic GFR-binding peptide
  MOD_RES (18)..(19): Xaa is C or S
SSDDIYLVSIPSLQTPAXXPKPVT

SEQ ID NO: 9256 - protein, 16 aa, Artificial Sequence
  Cyclic GFR-binding peptide
VKPKRGVIYLISIPSL

SEQ ID NO: 9257 - protein, 20 aa, Artificial Sequence
  Cyclic GFR-binding peptide
  MOD_RES (14)..(15): Xaa is C or S
LYLISIPELDQSVXXPSASA

SEQ ID NO: 9258 - protein, 16 aa, Artificial Sequence
  Cyclic GFR-binding peptide
VKPTRGVLYLISIPEL

SEQ ID NO: 9259 - protein, 15 aa, Artificial Sequence
  Cyclic GFR-binding peptide
VVNNAADFYLISIAN

SEQ ID NO: 9260 - protein, 26 aa, Artificial Sequence
  Cyclic GFR-binding peptide
  MOD_RES (20)..(21): Xaa is C or S
VNNSSDIYLVSIPSLKTPAXXAKPVA

SEQ ID NO: 9261 - protein, 13 aa, Artificial Sequence
  Cyclic GFR-binding peptide
FYLISIANLRAPV

SEQ ID NO: 9262 - protein, 20 aa, Artificial Sequence
  Cyclic GFR-binding peptide
  MOD_RES (14)..(15): Xaa is C or S
LYLMSIPELETPVXXAKPIS

SEQ ID NO: 9263 - protein, 20 aa, Artificial Sequence
  Cyclic GFR-binding peptide
  MOD_RES (14)..(15): Xaa is C or S
LYLISIPELRAPVXXSAPAA

SEQ ID NO: 9264 - protein, 20 aa, Artificial Sequence
  Cyclic GFR-binding peptide
  MOD_RES (14)..(14): Xaa is C or S
LYLVSIPELKTPAXTPKTVH

SEQ ID NO: 9265 - protein, 15 aa, Artificial Sequence
  Cyclic GFR-binding peptide
  MOD_RES (14)..(15): Xaa is C or S
KYLISIPSLRAPVXX

SEQ ID NO: 9266 - protein, 25 aa, Artificial Sequence
  Cyclic GFR-binding peptide
  MOD_RES (19)..(20): Xaa is C or S
VGMDDLYLVSIPELKTPVXXAKGVK

SEQ ID NO: 9267 - protein, 15 aa, Artificial Sequence
  Cyclic GFR-binding peptide
  MOD_RES (14)..(14): Xaa is C or S
LYLVSIPELKTPAXT

SEQ ID NO: 9268 - protein, 26 aa, Artificial Sequence
  Cyclic GFR-binding peptide
  MOD_RES (20)..(21): Xaa is C or S
VKENEDIYLMSIPSLETPVXXAKPIK

SEQ ID NO: 9269 - protein, 23 aa, Artificial Sequence
  Cyclic GFR-binding peptide
  MOD_RES (17)..(18): Xaa is C or S
AADKYLISIPSLRAPVXXSAPAA

SEQ ID NO: 9270 - protein, 25 aa, Artificial Sequence
  Cyclic GFR-binding peptide
  MOD_RES (19)..(20): Xaa is C or S
NSSDDIYLVSIPSLKTPAXXPKPVY

SEQ ID NO: 9271 - protein, 19 aa, Artificial Sequence
  Cyclic GFR-binding peptide
TPVGMDDLYLVSIPELKTP

SEQ ID NO: 9272 - protein, 22 aa, Artificial Sequence
  Cyclic GFR-binding peptide
  MOD_RES (16)..(17): Xaa is C or S
GVIYLISIPSLDQPVXXPSASA

SEQ ID NO: 9273 - protein, 18 aa, Artificial Sequence
  Cyclic GFR-binding peptide
  MOD_RES (14)..(15): Xaa is C or S
FYLISIANLRAPVXXSAP

SEQ ID NO: 9274 - protein, 18 aa, Artificial Sequence
  Cyclic GFR-binding peptide
VVKENEDIYLMSIPSLET

SEQ ID NO: 9275 - protein, 19 aa, Artificial Sequence
  Cyclic GFR-binding peptide
VVKENEDLYLMSIPELETP

SEQ ID NO: 9276 - protein, 15 aa, Artificial Sequence
  Cyclic GFR-binding peptide
YTVVGKDIYLISIPS

SEQ ID NO: 9277 - protein, 13 aa, Artificial Sequence
  Cyclic GFR-binding peptide
LYLVSIPELKTPV

SEQ ID NO: 9278 - protein, 15 aa, Artificial Sequence
  Cyclic GFR-binding peptide
VVNNAADKYLISIPS

SEQ ID NO: 9279 - protein, 13 aa, Artificial Sequence
  Cyclic GFR-binding peptide
KYLISIPSLRAPV

SEQ ID NO: 9280 - protein, 21 aa, Artificial Sequence
  Cyclic GFR-binding peptide
  MOD_RES (15)..(16): Xaa is C or S
DLYLVSIPELKTPAXXAKPVA

SEQ ID NO: 9281 - protein, 23 aa, Artificial Sequence
  Cyclic GFR-binding peptide
  MOD_RES (17)..(18): Xaa is C or S
NEDLYLMSIPELETPVXXAKPIK

SEQ ID NO: 9282 - protein, 15 aa, Artificial Sequence
  Cyclic GFR-binding peptide
  MOD_RES (14)..(15): Xaa is C or S
LYLVSIPELKTPVXX

SEQ ID NO: 9283 - protein, 25 aa, Artificial Sequence
  Cyclic GFR-binding peptide
  MOD_RES (19)..(20): Xaa is C or S
VVGKDFYLISIANLKTPVXXAKSAK

SEQ ID NO: 9284 - protein, 17 aa, Artificial Sequence
  Cyclic GFR-binding peptide
  MOD_RES (14)..(15): Xaa is C or S
IYLISIPSLAQPVXXPA

SEQ ID NO: 9285 - protein, 15 aa, Artificial Sequence
  Cyclic GFR-binding peptide
  MOD_RES (14)..(15): Xaa is C or S
FYLISIANLRAPVXX

SEQ ID NO: 9286 - protein, 21 aa, Artificial Sequence
  Cyclic GFR-binding peptide
  MOD_RES (15)..(16): Xaa is C or S
DLYLVSIPELKTPAXXPKPVY

SEQ ID NO: 9287 - protein, 19 aa, Artificial Sequence
  Cyclic GFR-binding peptide
IKPTKGIIYLISIPSLDQS

SEQ ID NO: 9288 - protein, 18 aa, Artificial Sequence
  Cyclic GFR-binding peptide
  MOD_RES (14)..(15): Xaa is C or S
IYLVSIPSLKTPVXXAKG

SEQ ID NO: 9289 - protein, 18 aa, Artificial Sequence
  Cyclic GFR-binding peptide
TPVGMDDIYLVSIPSLKT

SEQ ID NO: 9290 - protein, 26 aa, Artificial Sequence
  Cyclic GFR-binding peptide
  MOD_RES (20)..(21): Xaa is C or S
PVGMDDIYLVSIPSLKTPVXXAKGVK

SEQ ID NO: 9291 - protein, 21 aa, Artificial Sequence
  Cyclic GFR-binding peptide
  MOD_RES (15)..(16): Xaa is C or S
VIYLISIPSLDQPVXXPSASA

SEQ ID NO: 9292 - protein, 18 aa, Artificial Sequence
  Cyclic GFR-binding peptide
  MOD_RES (14)..(15): Xaa is C or S
IYLISIPSLDQPVXXPSA

SEQ ID NO: 9293 - protein, 16 aa, Artificial Sequence
  Cyclic GFR-binding peptide
VKPTRGVIYLISIPSL

SEQ ID NO: 9294 - protein, 17 aa, Artificial Sequence
  Cyclic GFR-binding peptide
  MOD_RES (14)..(15): Xaa is C or S
IYLISIPSLDQPVXXPS

SEQ ID NO: 9295 - protein, 16 aa, Artificial Sequence
  Cyclic GFR-binding peptide
  MOD_RES (14)..(15): Xaa is C or S
IYLISIPSLAQPVXXP

SEQ ID NO: 9296 - protein, 16 aa, Artificial Sequence
  Cyclic GFR-binding peptide
  MOD_RES (14)..(15): Xaa is C or S
LYLVSIPELQTPAXXP

SEQ ID NO: 9297 - protein, 17 aa, Artificial Sequence
  Cyclic GFR-binding peptide
TPVGMDDLYLVSIPELK

SEQ ID NO: 9298 - protein, 24 aa, Artificial Sequence
  Cyclic GFR-binding peptide
  MOD_RES (18)..(19): Xaa is C or S
KRGVIYLISIPSLAQPVXXPAASA

SEQ ID NO: 9299 - protein, 18 aa, Artificial Sequence
  Cyclic GFR-binding peptide
VVKDYEDLYLMSIPELET

SEQ ID NO: 9300 - protein, 18 aa, Artificial Sequence
  Cyclic GFR-binding peptide
IVNNSSDLYLVSIPELKT

SEQ ID NO: 9301 - protein, 27 aa, Artificial Sequence
  Cyclic GFR-binding peptide
  MOD_RES (21)..(22): Xaa is C or S
IVNSSDDLYLVSIPELKTPAXXPKPVY

SEQ ID NO: 9302 - protein, 17 aa, Artificial Sequence
  Cyclic GFR-binding peptide
  MOD_RES (14)..(15): Xaa is C or S
LYLVSIPELKTPAXXPK

SEQ ID NO: 9303 - protein, 15 aa, Artificial Sequence
  Cyclic GFR-binding peptide
IKPTKGIIYLISIPS

SEQ ID NO: 9304 - protein, 25 aa, Artificial Sequence
  Cyclic GFR-binding peptide
  MOD_RES (19)..(20): Xaa is C or S
KENEDIYLMSIPSLETPVXXAKPIK

SEQ ID NO: 9305 - protein, 22 aa, Artificial Sequence
  Cyclic GFR-binding peptide
  MOD_RES (16)..(17): Xaa is C or S
GVLYLISIPELDQPVXXPSASA

SEQ ID NO: 9306 - protein, 24 aa, Artificial Sequence
  Cyclic GFR-binding peptide
  MOD_RES (18)..(19): Xaa is C or S
VGKDKYLISIPSLKTPVXXAKSAK

SEQ ID NO: 9307 - protein, 17 aa, Artificial Sequence
  Cyclic GFR-binding peptide
YTVVGKDIYLISIPSLK

SEQ ID NO: 9308 - protein, 16 aa, Artificial Sequence
  Cyclic GFR-binding peptide
VVKENEDLYLMSIPEL

SEQ ID NO: 9309 - protein, 18 aa, Artificial Sequence
  Cyclic GFR-binding peptide
  MOD_RES (14)..(15): Xaa is C or S
LYLISIPELDQPVXXPSA

SEQ ID NO: 9310 - protein, 16 aa, Artificial Sequence
  Cyclic GFR-binding peptide
IVNSSDDIYLVSIPSL

SEQ ID NO: 9311 - protein, 20 aa, Artificial Sequence
  Cyclic GFR-binding peptide
  MOD_RES (14)..(15): Xaa is C or S
LYLISIPELAQPVXXPAASA

SEQ ID NO: 9312 - protein, 17 aa, Artificial Sequence
  Cyclic GFR-binding peptide
VVKENEDLYLMSIPELE

SEQ ID NO: 9313 - protein, 16 aa, Artificial Sequence
  Cyclic GFR-binding peptide
YTVVGKDIYLISIPSL

SEQ ID NO: 9314 - protein, 17 aa, Artificial Sequence
  Cyclic GFR-binding peptide
IVNSSDDIYLVSIPSLK

SEQ ID NO: 9315 - protein, 17 aa, Artificial Sequence
  Cyclic GFR-binding peptide
IVNSSDDIYLVSIPSLQ

SEQ ID NO: 9316 - protein, 27 aa, Artificial Sequence
  Cyclic GFR-binding peptide
  MOD_RES (21)..(22): Xaa is C or S
VKPTRGVLYLISIPELDQPVXXPSASA

SEQ ID NO: 9317 - protein, 20 aa, Artificial Sequence
  Cyclic GFR-binding peptide
  MOD_RES (14)..(15): Xaa is C or S
IYLVSIPSLKTPVXXAKGVK

SEQ ID NO: 9318 - protein, 26 aa, Artificial Sequence
  Cyclic GFR-binding peptide
  MOD_RES (20)..(21): Xaa is C or S
VKDYEDIYLMSIPSLETPVXXAKPIS

SEQ ID NO: 9319 - protein, 17 aa, Artificial Sequence
  Cyclic GFR-binding peptide
  MOD_RES (14)..(15): Xaa is C or S
LYLMSIPELETPVXXAK

SEQ ID NO: 9320 - protein, 15 aa, Artificial Sequence
  Cyclic GFR-binding peptide
  MOD_RES (14)..(14): Xaa is C or S
IYLVSIPSLKTPAXT

SEQ ID NO: 9321 - protein, 24 aa, Artificial Sequence
  Cyclic GFR-binding peptide
  MOD_RES (18)..(19): Xaa is C or S
SSDDIYLVSIPSLKTPAXXPKPVY

SEQ ID NO: 9322 - protein, 15 aa, Artificial Sequence
  Cyclic GFR-binding peptide
VKPTRGVLYLISIPE

SEQ ID NO: 9323 - protein, 24 aa, Artificial Sequence
  Cyclic GFR-binding peptide
  MOD_RES (18)..(19): Xaa is C or S
SSDDLYLVSIPELQTPAXXPKPVT

SEQ ID NO: 9324 - protein, 13 aa, Artificial Sequence
  Cyclic GFR-binding peptide
LYLVSIPELKTPA

SEQ ID NO: 9325 - protein, 26 aa, Artificial Sequence
  Cyclic GFR-binding peptide
  MOD_RES (20)..(21): Xaa is C or S
KPKRGVIYLISIPSLAQPVXXPAASA

SEQ ID NO: 9326 - protein, 22 aa, Artificial Sequence
  Cyclic GFR-binding peptide
  MOD_RES (16)..(17): Xaa is C or S
ADKYLISIPSLRAPVXXSAPAA

SEQ ID NO: 9327 - protein, 22 aa, Artificial Sequence
  Cyclic GFR-binding peptide
  MOD_RES (16)..(17): Xaa is C or S
ADLYLISIPELRAPVXXSAPAA

SEQ ID NO: 9328 - protein, 16 aa, Artificial Sequence
  Cyclic GFR-binding peptide
TPVGMDDLYLVSIPEL

SEQ ID NO: 9329 - protein, 15 aa, Artificial Sequence
  Cyclic GFR-binding peptide
  MOD_RES (14)..(15): Xaa is C or S
IYLMSIPSLETPVXX

SEQ ID NO: 9330 - protein, 26 aa, Artificial Sequence
  Cyclic GFR-binding peptide
  MOD_RES (20)..(21): Xaa is C or S
VNNAADKYLISIPSLRAPVXXSAPAA

SEQ ID NO: 9331 - protein, 21 aa, Artificial Sequence
  Cyclic GFR-binding peptide
  MOD_RES (15)..(16): Xaa is C or S
DIYLVSIPSLKTPAXXAKPVA

SEQ ID NO: 9332 - protein, 19 aa, Artificial Sequence
  Cyclic GFR-binding peptide
YTVVGKDIYLISIPSLKTP

SEQ ID NO: 9333 - protein, 26 aa, Artificial Sequence
  Cyclic GFR-binding peptide
  MOD_RES (20)..(21): Xaa is C or S
VNSSDDLYLVSIPELKTPAXXPKPVY

SEQ ID NO: 9334 - protein, 14 aa, Artificial Sequence
  Cyclic GFR-binding peptide
  MOD_RES (14)..(14): Xaa is C or S
IYLMSIPSLETPVX

SEQ ID NO: 9335 - protein, 16 aa, Artificial Sequence
  Cyclic GFR-binding peptide
  MOD_RES (14)..(15): Xaa is C or S
IYLISIPSLDQSVXXP

SEQ ID NO: 9336 - protein, 23 aa, Artificial Sequence
  Cyclic GFR-binding peptide
  MOD_RES (17)..(18): Xaa is C or S
SDDLYLVSIPELQTPAXXPKPVT

SEQ ID NO: 9337 - protein, 14 aa, Artificial Sequence
  Cyclic GFR-binding peptide
  MOD_RES (14)..(14): Xaa is C or S
LYLVSIPELKTPAX

SEQ ID NO: 9338 - protein, 18 aa, Artificial Sequence
  Cyclic GFR-binding peptide
  MOD_RES (14)..(15): Xaa is C or S
KYLISIPSLKTPVXXAKS

SEQ ID NO: 9339 - protein, 18 aa, Artificial Sequence
  Cyclic GFR-binding peptide
  MOD_RES (14)..(15): Xaa is C or S
IYLISIPSLKTPVXXAKS

SEQ ID NO: 9340 - protein, 15 aa, Artificial Sequence
  Cyclic GFR-binding peptide
VKPKRGVIYLISIPS

SEQ ID NO: 9341 - protein, 27 aa, Artificial Sequence
  Cyclic GFR-binding peptide
  MOD_RES (21)..(22): Xaa is C or S
VKPTRGVIYLISIPSLDQPVXXPSASA

SEQ ID NO: 9342 - protein, 14 aa, Artificial Sequence
  Cyclic GFR-binding peptide
  MOD_RES (14)..(14): Xaa is C or S
KYLISIPSLRAPVX

SEQ ID NO: 9343 - protein, 20 aa, Artificial Sequence
  Cyclic GFR-binding peptide
  MOD_RES (14)..(15): Xaa is C or S
LYLMSIPELETPVXXAKPIK

SEQ ID NO: 9344 - protein, 16 aa, Artificial Sequence
  Cyclic GFR-binding peptide
  MOD_RES (14)..(15): Xaa is C or S
LYLVSIPELKTPVXXA

SEQ ID NO: 9345 - protein, 24 aa, Artificial Sequence
  Cyclic GFR-binding peptide
  MOD_RES (18)..(19): Xaa is C or S
SSDDLYLVSIPELKTPAXXPKPVY

SEQ ID NO: 9346 - protein, 26 aa, Artificial Sequence
  Cyclic GFR-binding peptide
  MOD_RES (20)..(21): Xaa is C or S
TVVGKDIYLISIPSLKTPVXXAKSAK

SEQ ID NO: 9347 - protein, 26 aa, Artificial Sequence
  Cyclic GFR-binding peptide
  MOD_RES (20)..(21): Xaa is C or S
VKDYEDLYLMSIPELETPVXXAKPIS

SEQ ID NO: 9348 - protein, 25 aa, Artificial Sequence
  Cyclic GFR-binding peptide
  MOD_RES (19)..(20): Xaa is C or S
PTKGILYLISIPELDQSVXXPSASA

SEQ ID NO: 9349 - protein, 18 aa, Artificial Sequence
  Cyclic GFR-binding peptide
  MOD_RES (14)..(15): Xaa is C or S
LYLVSIPELQTPAXXPKP

SEQ ID NO: 9350 - protein, 17 aa, Artificial Sequence
  Cyclic GFR-binding peptide
  MOD_RES (14)..(15): Xaa is C or S
FYLISIANLKTPVXXAK

SEQ ID NO: 9351 - protein, 20 aa, Artificial Sequence
  Cyclic GFR-binding peptide
  MOD_RES (14)..(15): Xaa is C or S
KYLISIPSLRAPVXXSAPAA

SEQ ID NO: 9352 - protein, 16 aa, Artificial Sequence
  Cyclic GFR-binding peptide
VVNNAADFYLISIANL

SEQ ID NO: 9353 - protein, 16 aa, Artificial Sequence
  Cyclic GFR-binding peptide
  MOD_RES (14)..(15): Xaa is C or S
LYLISIPELRAPVXXS

SEQ ID NO: 9354 - protein, 19 aa, Artificial Sequence
  Cyclic GFR-binding peptide
  MOD_RES (14)..(14): Xaa is C or S
LYLVSIPELKTPAXTPKTV

SEQ ID NO: 9355 - protein, 26 aa, Artificial Sequence
  Cyclic GFR-binding peptide
  MOD_RES (20)..(21): Xaa is C or S
KPKRGVLYLISIPELAQPVXXPAASA

SEQ ID NO: 9356 - protein, 15 aa, Artificial Sequence
  Cyclic GFR-binding peptide
IVNSSDDIYLVSIPS

SEQ ID NO: 9357 - protein, 17 aa, Artificial Sequence
  Cyclic GFR-binding peptide
  MOD_RES (14)..(15): Xaa is C or S
IYLISIPSLDQSVXXPS

SEQ ID NO: 9358 - protein, 21 aa, Artificial Sequence
  Cyclic GFR-binding peptide
  MOD_RES (15)..(16): Xaa is C or S
ILYLISIPELDQSVXXPSASA

SEQ ID NO: 9359 - protein, 21 aa, Artificial Sequence
  Cyclic GFR-binding peptide
  MOD_RES (15)..(16): Xaa is C or S
VLYLISIPELDQPVXXPSASA

SEQ ID NO: 9360 - protein, 21 aa, Artificial Sequence
  Cyclic GFR-binding peptide
  MOD_RES (15)..(16): Xaa is C or S
DLYLVSIPELKTPVXXAKGVK

SEQ ID NO: 9361 - protein, 16 aa, Artificial Sequence
  Cyclic GFR-binding peptide
VVNNAADKYLISIPSL

SEQ ID NO: 9362 - protein, 20 aa, Artificial Sequence
  Cyclic GFR-binding peptide
  MOD_RES (14)..(15): Xaa is C or S
FYLISIANLRAPVXXSAPAA

SEQ ID NO: 9363 - protein, 26 aa, Artificial Sequence
  Cyclic GFR-binding peptide
  MOD_RES (20)..(21): Xaa is C or S
KPTKGIIYLISIPSLDQSVXXPSASA

SEQ ID NO: 9364 - protein, 18 aa, Artificial Sequence
  Cyclic GFR-binding peptide
  MOD_RES (14)..(15): Xaa is C or S
LYLISIPELDQSVXXPSA

SEQ ID NO: 9365 - protein, 19 aa, Artificial Sequence
  Cyclic GFR-binding peptide
  MOD_RES (14)..(15): Xaa is C or S
IYLMSIPSLETPVXXAKPI

SEQ ID NO: 9366 - protein, 19 aa, Artificial Sequence
  Cyclic GFR-binding peptide
IVNNSSDLYLVSIPELKTP

SEQ ID NO: 9367 - protein, 27 aa, Artificial Sequence
  Cyclic GFR-binding peptide
  MOD_RES (21)..(22): Xaa is C or S
IKPTKGILYLISIPELDQSVXXPSASA

SEQ ID NO: 9368 - protein, 17 aa, Artificial Sequence
  Cyclic GFR-binding peptide
  MOD_RES (14)..(15): Xaa is C or S
KYLISIPSLRAPVXXSA

SEQ ID NO: 9369 - protein, 17 aa, Artificial Sequence
  Cyclic GFR-binding peptide
VVKENEDIYLMSIPSLE

SEQ ID NO: 9370 - protein, 16 aa, Artificial Sequence
  Cyclic GFR-binding peptide
  MOD_RES (14)..(15): Xaa is C or S
IYLMSIPSLETPVXXA

SEQ ID NO: 9371 - protein, 23 aa, Artificial Sequence
  Cyclic GFR-binding peptide
  MOD_RES (17)..(18): Xaa is C or S
SDDIYLVSIPSLKTPAXXPKPVY

SEQ ID NO: 9372 - protein, 15 aa, Artificial Sequence
  Cyclic GFR-binding peptide
YTVVGKDKYLISIPS

SEQ ID NO: 9373 - protein, 19 aa, Artificial Sequence
  Cyclic GFR-binding peptide
IKPTKGILYLISIPELDQS

SEQ ID NO: 9374 - protein, 18 aa, Artificial Sequence
  Cyclic GFR-binding peptide
VVKDYEDIYLMSIPSLET

SEQ ID NO: 9375 - protein, 15 aa, Artificial Sequence
  Cyclic GFR-binding peptide
VKPKRGVLYLISIPE

SEQ ID NO: 9376 - protein, 23 aa, Artificial Sequence
  Cyclic GFR-binding peptide
  MOD_RES (17)..(18): Xaa is C or S
GKDIYLISIPSLKTPVXXAKSAK

SEQ ID NO: 9377 - protein, 14 aa, Artificial Sequence
  Cyclic GFR-binding peptide
  MOD_RES (14)..(14): Xaa is C or S
IYLISIPSLDQSVX

SEQ ID NO: 9378 - protein, 13 aa, Artificial Sequence
  Cyclic GFR-binding peptide
IYLMSIPSLETPV

SEQ ID NO: 9379 - protein, 27 aa, Artificial Sequence
  Cyclic GFR-binding peptide
  MOD_RES (21)..(22): Xaa is C or S
VVKDYEDIYLMSIPSLETPVXXAKPIS

SEQ ID NO: 9380 - protein, 26 aa, Artificial Sequence
  Cyclic GFR-binding peptide
  MOD_RES (20)..(21): Xaa is C or S
VNSSDDLYLVSIPELQTPAXXPKPVT

SEQ ID NO: 9381 - protein, 21 aa, Artificial Sequence
  Cyclic GFR-binding peptide
  MOD_RES (15)..(15): Xaa is C or S
DLYLVSIPELKTPAXTPKTVH

SEQ ID NO: 9382 - protein, 13 aa, Artificial Sequence
  Cyclic GFR-binding peptide
IYLVSIPSLKTPV

SEQ ID NO: 9383 - protein, 18 aa, Artificial Sequence
  Cyclic GFR-binding peptide
IVNNSSDIYLVSIPSLKT

SEQ ID NO: 9384 - protein, 17 aa, Artificial Sequence
  Cyclic GFR-binding peptide
YTVVGKDFYLISIANLK

SEQ ID NO: 9385 - protein, 19 aa, Artificial Sequence
  Cyclic GFR-binding peptide
  MOD_RES (14)..(15): Xaa is C or S
IYLVSIPSLKTPAXXAKPV

SEQ ID NO: 9386 - protein, 16 aa, Artificial Sequence
  Cyclic GFR-binding peptide
  MOD_RES (14)..(15): Xaa is C or S
IYLISIPSLKTPVXXA

SEQ ID NO: 9387 - protein, 18 aa, Artificial Sequence
  Cyclic GFR-binding peptide
VVKENEDLYLMSIPELET

SEQ ID NO: 9388 - protein, 16 aa, Artificial Sequence
  Cyclic GFR-binding peptide
  MOD_RES (14)..(15): Xaa is C or S
KYLISIPSLKTPVXXA

SEQ ID NO: 9389 - protein, 18 aa, Artificial Sequence
  Cyclic GFR-binding peptide
YTVVGKDIYLISIPSLKT

SEQ ID NO: 9390 - protein, 23 aa, Artificial Sequence
  Cyclic GFR-binding peptide
  MOD_RES (17)..(18): Xaa is C or S
SSDLYLVSIPELKTPAXXAKPVA

SEQ ID NO: 9391 - protein, 22 aa, Artificial Sequence
  Cyclic GFR-binding peptide
  MOD_RES (16)..(17): Xaa is C or S
ADFYLISIANLRAPVXXSAPAA

SEQ ID NO: 9392 - protein, 13 aa, Artificial Sequence
  Cyclic GFR-binding peptide
LYLISIPELAQPV

SEQ ID NO: 9393 - protein, 15 aa, Artificial Sequence
  Cyclic GFR-binding peptide
VVKENEDIYLMSIPS

SEQ ID NO: 9394 - protein, 15 aa, Artificial Sequence
  Cyclic GFR-binding peptide
  MOD_RES (14)..(15): Xaa is C or S
LYLISIPELRAPVXX

SEQ ID NO: 9395 - protein, 22 aa, Artificial Sequence
  Cyclic GFR-binding peptide
  MOD_RES (16)..(17): Xaa is C or S
EDIYLMSIPSLETPVXXAKPIK

SEQ ID NO: 9396 - protein, 23 aa, Artificial Sequence
  Cyclic GFR-binding peptide
  MOD_RES (17)..(18): Xaa is C or S
MDDLYLVSIPELKTPVXXAKGVK

SEQ ID NO: 9397 - protein, 26 aa, Artificial Sequence
  Cyclic GFR-binding peptide
  MOD_RES (20)..(20): Xaa is C or S
VNSSDDLYLVSIPELKTPAXTPKTVH

SEQ ID NO: 9398 - protein, 18 aa, Artificial Sequence
  Cyclic GFR-binding peptide
  MOD_RES (14)..(15): Xaa is C or S
LYLVSIPELKTPAXXAKP

SEQ ID NO: 9399 - protein, 19 aa, Artificial Sequence
  Cyclic GFR-binding peptide
  MOD_RES (14)..(15): Xaa is C or S
KYLISIPSLKTPVXXAKSA

SEQ ID NO: 9400 - protein, 26 aa, Artificial Sequence
  Cyclic GFR-binding peptide
  MOD_RES (20)..(21): Xaa is C or S
PVGMDDLYLVSIPELKTPVXXAKGVK

SEQ ID NO: 9401 - protein, 19 aa, Artificial Sequence
  Cyclic GFR-binding peptide
  MOD_RES (14)..(15): Xaa is C or S
IYLISIPSLKTPVXXAKSA

SEQ ID NO: 9402 - protein, 27 aa, Artificial Sequence
  Cyclic GFR-binding peptide
  MOD_RES (21)..(22): Xaa is C or S
YTVVGKDIYLISIPSLKTPVXXAKSAK

SEQ ID NO: 9403 - protein, 16 aa, Artificial Sequence
  Cyclic GFR-binding peptide
  MOD_RES (14)..(15): Xaa is C or S
IYLVSIPSLKTPAXXA

SEQ ID NO: 9404 - protein, 25 aa, Artificial Sequence
  Cyclic GFR-binding peptide
  MOD_RES (19)..(20): Xaa is C or S
NNAADKYLISIPSLRAPVXXSAPAA

SEQ ID NO: 9405 - protein, 23 aa, Artificial Sequence
  Cyclic GFR-binding peptide
  MOD_RES (17)..(18): Xaa is C or S
RGVLYLISIPELAQPVXXPAASA

SEQ ID NO: 9406 - protein, 17 aa, Artificial Sequence
  Cyclic GFR-binding peptide
VKPKRGVIYLISIPSLA

SEQ ID NO: 9407 - protein, 18 aa, Artificial Sequence
  Cyclic GFR-binding peptide
VKPTRGVLYLISIPELDQ

SEQ ID NO: 9408 - protein, 27 aa, Artificial Sequence
  Cyclic GFR-binding peptide
  MOD_RES (21)..(22): Xaa is C or S
IVNNSSDLYLVSIPELKTPAXXAKPVA

SEQ ID NO: 9409 - protein, 16 aa, Artificial Sequence
  Cyclic GFR-binding peptide
  MOD_RES (14)..(15): Xaa is C or S
IYLISIPSLDQPVXXP

SEQ ID NO: 9410 - protein, 16 aa, Artificial Sequence
  Cyclic GFR-binding peptide
TPVGMDDIYLVSIPSL

SEQ ID NO: 9411 - protein, 15 aa, Artificial Sequence
  Cyclic GFR-binding peptide
  MOD_RES (14)..(15): Xaa is C or S
IYLISIPSLDQSVXX

SEQ ID NO: 9412 - protein, 18 aa, Artificial Sequence
  Cyclic GFR-binding peptide
  MOD_RES (14)..(15): Xaa is C or S
KYLISIPSLRAPVXXSAP

SEQ ID NO: 9413 - protein, 15 aa, Artificial Sequence
  Cyclic GFR-binding peptide
IKPTKGILYLISIPE

SEQ ID NO: 9414 - protein, 25 aa, Artificial Sequence
  Cyclic GFR-binding peptide
  MOD_RES (19)..(20): Xaa is C or S
NSSDDIYLVSIPSLQTPAXXPKPVT

SEQ ID NO: 9415 - protein, 17 aa, Artificial Sequence
  Cyclic GFR-binding peptide
  MOD_RES (14)..(14): Xaa is C or S
IYLVSIPSLKTPAXTPK

SEQ ID NO: 9416 - protein, 26 aa, Artificial Sequence
  Cyclic GFR-binding peptide
  MOD_RES (20)..(20): Xaa is C or S
VNSSDDIYLVSIPSLKTPAXTPKTVH

SEQ ID NO: 9417 - protein, 27 aa, Artificial Sequence
  Cyclic GFR-binding peptide
  MOD_RES (21)..(22): Xaa is C or S
VKPKRGVIYLISIPSLAQPVXXPAASA

SEQ ID NO: 9418 - protein, 25 aa, Artificial Sequence
  Cyclic GFR-binding peptide
  MOD_RES (19)..(20): Xaa is C or S
VVGKDIYLISIPSLKTPVXXAKSAK

SEQ ID NO: 9419 - protein, 19 aa, Artificial Sequence
  Cyclic GFR-binding peptide
TPVGMDDIYLVSIPSLKTP

SEQ ID NO: 9420 - protein, 20 aa, Artificial Sequence
  Cyclic GFR-binding peptide
  MOD_RES (14)..(15): Xaa is C or S
LYLVSIPELKTPAXXAKPVA

SEQ ID NO: 9421 - protein, 15 aa, Artificial Sequence
  Cyclic GFR-binding peptide
  MOD_RES (14)..(15): Xaa is C or S
IYLISIPSLAQPVXX

SEQ ID NO: 9422 - protein, 23 aa, Artificial Sequence
  Cyclic GFR-binding peptide
  MOD_RES (17)..(18): Xaa is C or S
RGVIYLISIPSLDQPVXXPSASA

SEQ ID NO: 9423 - protein, 21 aa, Artificial Sequence
  Cyclic GFR-binding peptide
  MOD_RES (15)..(16): Xaa is C or S
DLYLMSIPELETPVXXAKPIS

SEQ ID NO: 9424 - protein, 26 aa, Artificial Sequence
  Cyclic GFR-binding peptide
  MOD_RES (20)..(21): Xaa is C or S
VKENEDLYLMSIPELETPVXXAKPIK

SEQ ID NO: 9425 - protein, 18 aa, Artificial Sequence
  Cyclic GFR-binding peptide
IVNSSDDLYLVSIPELKT

SEQ ID NO: 9426 - protein, 14 aa, Artificial Sequence
  Cyclic GFR-binding peptide
  MOD_RES (14)..(14): Xaa is C or S
LYLISIPELRAPVX

SEQ ID NO: 9427 - protein, 18 aa, Artificial Sequence
  Cyclic GFR-binding peptide
  MOD_RES (14)..(15): Xaa is C or S
IYLISIPSLAQPVXXPAA

SEQ ID NO: 9428 - protein, 18 aa, Artificial Sequence
  Cyclic GFR-binding peptide
IVNSSDDLYLVSIPELQT

SEQ ID NO: 9429 - protein, 26 aa, Artificial Sequence
  Cyclic GFR-binding peptide
  MOD_RES (20)..(21): Xaa is C or S
TVVGKDFYLISIANLKTPVXXAKSAK

SEQ ID NO: 9430 - protein, 23 aa, Artificial Sequence
  Cyclic GFR-binding peptide
  MOD_RES (17)..(18): Xaa is C or S
AADFYLISIANLRAPVXXSAPAA

SEQ ID NO: 9431 - protein, 18 aa, Artificial Sequence
  Cyclic GFR-binding peptide
  MOD_RES (14)..(15): Xaa is C or S
IYLVSIPSLQTPAXXPKP

SEQ ID NO: 9432 - protein, 13 aa, Artificial Sequence
  Cyclic GFR-binding peptide
IYLVSIPSLQTPA

SEQ ID NO: 9433 - protein, 21 aa, Artificial Sequence
  Cyclic GFR-binding peptide
  MOD_RES (15)..(16): Xaa is C or S
DLYLVSIPELQTPAXXPKPVT

SEQ ID NO: 9434 - protein, 13 aa, Artificial Sequence
  Cyclic GFR-binding peptide
IYLISIPSLKTPV

SEQ ID NO: 9435 - protein, 13 aa, Artificial Sequence
  Cyclic GFR-binding peptide
KYLISIPSLKTPV

SEQ ID NO: 9436 - protein, 27 aa, Artificial Sequence
  Cyclic GFR-binding peptide
  MOD_RES (21)..(22): Xaa is C or S
YTVVGKDFYLISIANLKTPVXXAKSAK

SEQ ID NO: 9437 - protein, 24 aa, Artificial Sequence
  Cyclic GFR-binding peptide
  MOD_RES (18)..(19): Xaa is C or S
VGKDFYLISIANLKTPVXXAKSAK

SEQ ID NO: 9438 - protein, 23 aa, Artificial Sequence
  Cyclic GFR-binding peptide
  MOD_RES (17)..(18): Xaa is C or S
YEDIYLMSIPSLETPVXXAKPIS

SEQ ID NO: 9439 - protein, 14 aa, Artificial Sequence
  Cyclic GFR-binding peptide
  MOD_RES (14)..(14): Xaa is C or S
IYLISIPSLDQPVX

SEQ ID NO: 9440 - protein, 13 aa, Artificial Sequence
  Cyclic GFR-binding peptide
LYLISIPELDQSV

SEQ ID NO: 9441 - protein, 27 aa, Artificial Sequence
  Cyclic GFR-binding peptide
  MOD_RES (21)..(22): Xaa is C or S
IVNSSDDIYLVSIPSLQTPAXXPKPVT

SEQ ID NO: 9442 - protein, 18 aa, Artificial Sequence
  Cyclic GFR-binding peptide
  MOD_RES (14)..(14): Xaa is C or S
IYLVSIPSLKTPAXTPKT

SEQ ID NO: 9443 - protein, 17 aa, Artificial Sequence
  Cyclic GFR-binding peptide
VVKDYEDIYLMSIPSLE

SEQ ID NO: 9444 - protein, 19 aa, Artificial Sequence
  Cyclic GFR-binding peptide
VKPKRGVIYLISIPSLAQP

SEQ ID NO: 9445 - protein, 15 aa, Artificial Sequence
  Cyclic GFR-binding peptide
  MOD_RES (14)..(15): Xaa is C or S
IYLISIPSLDQPVXX

SEQ ID NO: 9446 - protein, 20 aa, Artificial Sequence
  Cyclic GFR-binding peptide
  MOD_RES (14)..(15): Xaa is C or S
IYLISIPSLAQPVXXPAASA

SEQ ID NO: 9447 - protein, 16 aa, Artificial Sequence
  Cyclic GFR-binding peptide
VVKDYEDLYLMSIPEL

SEQ ID NO: 9448 - protein, 16 aa, Artificial Sequence
  Cyclic GFR-binding peptide
  MOD_RES (14)..(15): Xaa is C or S
IYLVSIPSLKTPVXXA

SEQ ID NO: 9449 - protein, 18 aa, Artificial Sequence
  Cyclic GFR-binding peptide
IKPTKGILYLISIPELDQ

SEQ ID NO: 9450 - protein, 19 aa, Artificial Sequence
  Cyclic GFR-binding peptide
  MOD_RES (14)..(15): Xaa is C or S
LYLISIPELDQSVXXPSAS

SEQ ID NO: 9451 - protein, 17 aa, Artificial Sequence
  Cyclic GFR-binding peptide
  MOD_RES (14)..(15): Xaa is C or S
IYLVSIPSLKTPAXXPK

SEQ ID NO: 9452 - protein, 25 aa, Artificial Sequence
  Cyclic GFR-binding peptide
  MOD_RES (19)..(20): Xaa is C or S
NSSDDLYLVSIPELQTPAXXPKPVT

SEQ ID NO: 9453 - protein, 21 aa, Artificial Sequence
  Cyclic GFR-binding peptide
  MOD_RES (15)..(16): Xaa is C or S
DIYLVSIPSLKTPAXXPKPVY

SEQ ID NO: 9454 - protein, 17 aa, Artificial Sequence
  Cyclic GFR-binding peptide
  MOD_RES (14)..(15): Xaa is C or S
IYLVSIPSLQTPAXXPK

SEQ ID NO: 9455 - protein, 23 aa, Artificial Sequence
  Cyclic GFR-binding peptide
  MOD_RES (17)..(18): Xaa is C or S
SDDIYLVSIPSLQTPAXXPKPVT

SEQ ID NO: 9456 - protein, 14 aa, Artificial Sequence
  Cyclic GFR-binding peptide
  MOD_RES (14)..(14): Xaa is C or S
FYLISIANLRAPVX

SEQ ID NO: 9457 - protein, 25 aa, Artificial Sequence
  Cyclic GFR-binding peptide
  MOD_RES (19)..(20): Xaa is C or S
NNAADFYLISIANLRAPVXXSAPAA

SEQ ID NO: 9458 - protein, 14 aa, Artificial Sequence
  Cyclic GFR-binding peptide
  MOD_RES (14)..(14): Xaa is C or S
IYLISIPSLAQPVX

SEQ ID NO: 9459 - protein, 27 aa, Artificial Sequence
  Cyclic GFR-binding peptide
  MOD_RES (21)..(22): Xaa is C or S
YTVVGKDKYLISIPSLKTPVXXAKSAK

SEQ ID NO: 9460 - protein, 27 aa, Artificial Sequence
  Cyclic GFR-binding peptide
  MOD_RES (21)..(22): Xaa is C or S
TPVGMDDIYLVSIPSLKTPVXXAKGVK

SEQ ID NO: 9461 - protein, 18 aa, Artificial Sequence
  Cyclic GFR-binding peptide
  MOD_RES (14)..(15): Xaa is C or S
IYLVSIPSLKTPAXXPKP

SEQ ID NO: 9462 - protein, 19 aa, Artificial Sequence
  Cyclic GFR-binding peptide
VVKDYEDLYLMSIPELETP

SEQ ID NO: 9463 - protein, 25 aa, Artificial Sequence
  Cyclic GFR-binding peptide
  MOD_RES (19)..(20): Xaa is C or S
KDYEDLYLMSIPELETPVXXAKPIS

SEQ ID NO: 9464 - protein, 16 aa, Artificial Sequence
  Cyclic GFR-binding peptide
IKPTKGIIYLISIPSL

SEQ ID NO: 9465 - protein, 13 aa, Artificial Sequence
  Cyclic GFR-binding peptide
IYLVSIPSLKTPA

SEQ ID NO: 9466 - protein, 24 aa, Artificial Sequence
  Cyclic GFR-binding peptide
  MOD_RES (18)..(19): Xaa is C or S
TKGIIYLISIPSLDQSVXXPSASA

SEQ ID NO: 9467 - protein, 17 aa, Artificial Sequence
  Cyclic GFR-binding peptide
YTVVGKDKYLISIPSLK

SEQ ID NO: 9468 - protein, 15 aa, Artificial Sequence
  Cyclic GFR-binding peptide
TPVGMDDLYLVSIPE

SEQ ID NO: 9469 - protein, 20 aa, Artificial Sequence
  Cyclic GFR-binding peptide
  MOD_RES (14)..(15): Xaa is C or S
LYLVSIPELKTPAXXPKPVY

SEQ ID NO: 9470 - protein, 26 aa, Artificial Sequence
  Cyclic GFR-binding peptide
  MOD_RES (20)..(21): Xaa is C or S
KPTRGVIYLISIPSLDQPVXXPSASA

SEQ ID NO: 9471 - protein, 23 aa, Artificial Sequence
  Cyclic GFR-binding peptide
  MOD_RES (6)..(7): Xaa is C or S
ASASPXXVPQDLEPISILYLVGR

SEQ ID NO: 9472 - protein, 13 aa, Artificial Sequence
  Cyclic GFR-binding peptide
VPQDLEPISILYL

SEQ ID NO: 9473 - protein, 14 aa, Artificial Sequence
  Cyclic GFR-binding peptide
  MOD_RES (1)..(1): Xaa is C or S
XVPTKLNAISILYF

SEQ ID NO: 9474 - protein, 13 aa, Artificial Sequence
  Cyclic GFR-binding peptide
VPTELEPISMLYL

SEQ ID NO: 9475 - protein, 19 aa, Artificial Sequence
  Cyclic GFR-binding peptide
  MOD_RES (5)..(6): Xaa is C or S
APASXXVPARLSPISILYK

SEQ ID NO: 9476 - protein, 14 aa, Artificial Sequence
  Cyclic GFR-binding peptide
  MOD_RES (1)..(1): Xaa is C or S
XVSQDLEPISILYL

SEQ ID NO: 9477 - protein, 17 aa, Artificial Sequence
  Cyclic GFR-binding peptide
RLSPISILYKDAANNVV

SEQ ID NO: 9478 - protein, 19 aa, Artificial Sequence
  Cyclic GFR-binding peptide
PARLSPISILYKDAANNVV

SEQ ID NO: 9479 - protein, 26 aa, Artificial Sequence
  Cyclic GFR-binding peptide
  MOD_RES (6)..(7): Xaa is C or S
TVPKPXXAPTQLSPISVLYIDDSSNV

SEQ ID NO: 9480 - protein, 21 aa, Artificial Sequence
  Cyclic GFR-binding peptide
  MOD_RES (6)..(7): Xaa is C or S
KASKAXXVPTKLSPISILYKD

SEQ ID NO: 9481 - protein, 16 aa, Artificial Sequence
  Cyclic GFR-binding peptide
  MOD_RES (3)..(3): Xaa is C or S
PTXAPTKLEPISVLYL

SEQ ID NO: 9482 - protein, 19 aa, Artificial Sequence
  Cyclic GFR-binding peptide
PTKLEPISVLYLDDSSNVI

SEQ ID NO: 9483 - protein, 14 aa, Artificial Sequence
  Cyclic GFR-binding peptide
  MOD_RES (1)..(1): Xaa is C or S
XVPTKLSPISILYI

SEQ ID NO: 9484 - protein, 14 aa, Artificial Sequence
  Cyclic GFR-binding peptide
  MOD_RES (1)..(1): Xaa is C or S
XVPTKLSPISILYK

SEQ ID NO: 9485 - protein, 18 aa, Artificial Sequence
  Cyclic GFR-binding peptide
ARLEPISILYLDAANNVV

SEQ ID NO: 9486 - protein, 24 aa, Artificial Sequence
  Cyclic GFR-binding peptide
  MOD_RES (6)..(7): Xaa is C or S
KIPKAXXVPTELEPISMLYLDENE

SEQ ID NO: 9487 - protein, 18 aa, Artificial Sequence
  Cyclic GFR-binding peptide
TKLNAISILYFDKGVVTY

SEQ ID NO: 9488 - protein, 22 aa, Artificial Sequence
  Cyclic GFR-binding peptide
  MOD_RES (6)..(7): Xaa is C or S
AVPKAXXAPTKLEPISVLYLDS

SEQ ID NO: 9489 - protein, 22 aa, Artificial Sequence
  Cyclic GFR-binding peptide
  MOD_RES (6)..(7): Xaa is C or S
KVGKAXXVPTKLEPISVLYLDD

SEQ ID NO: 9490 - protein, 19 aa, Artificial Sequence
  Cyclic GFR-binding peptide
PQDLEPISILYLVGRTPKV

SEQ ID NO: 9491 - protein, 17 aa, Artificial Sequence
  Cyclic GFR-binding peptide
  MOD_RES (3)..(4): Xaa is C or S
SPXXVSQDLEPISILYL

SEQ ID NO: 9492 - protein, 25 aa, Artificial Sequence
  Cyclic GFR-binding peptide
  MOD_RES (6)..(7): Xaa is C or S
SIPKAXXVPTELSPISMLYIDEYDK

SEQ ID NO: 9493 - protein, 26 aa, Artificial Sequence
  Cyclic GFR-binding peptide
  MOD_RES (6)..(7): Xaa is C or S
ASASPXXVPQDLEPISILYLVGRTPK

SEQ ID NO: 9494 - protein, 16 aa, Artificial Sequence
  Cyclic GFR-binding peptide
  MOD_RES (2)..(3): Xaa is C or S
SXXVPARLNAISILYF

SEQ ID NO: 9495 - protein, 25 aa, Artificial Sequence
  Cyclic GFR-binding peptide
  MOD_RES (6)..(7): Xaa is C or S
KIPKAXXVPTELEPISMLYLDENEK

SEQ ID NO: 9496 - protein, 22 aa, Artificial Sequence
  Cyclic GFR-binding peptide
  MOD_RES (6)..(7): Xaa is C or S
SIPKAXXVPTELEPISMLYLDE

SEQ ID NO: 9497 - protein, 19 aa, Artificial Sequence
  Cyclic GFR-binding peptide
  MOD_RES (5)..(6): Xaa is C or S
APASXXVPARLNAISILYF

SEQ ID NO: 9498 - protein, 17 aa, Artificial Sequence
  Cyclic GFR-binding peptide
  MOD_RES (4)..(4): Xaa is C or S
KPTXAPTKLEPISVLYL

SEQ ID NO: 9499 - protein, 18 aa, Artificial Sequence
  Cyclic GFR-binding peptide
TQLSPISVLYIDDSSNVI

SEQ ID NO: 9500 - protein, 18 aa, Artificial Sequence
  Cyclic GFR-binding peptide
TKLSPISVLYIDDSSNVI

SEQ ID NO: 9501 - protein, 17 aa, Artificial Sequence
  Cyclic GFR-binding peptide
ALEPISILYLVGRKPKV

SEQ ID NO: 9502 - protein, 16 aa, Artificial Sequence
  Cyclic GFR-binding peptide
  MOD_RES (2)..(3): Xaa is C or S
SXXVPARLSPISILYK

SEQ ID NO: 9503 - protein, 17 aa, Artificial Sequence
  Cyclic GFR-binding peptide
  MOD_RES (3)..(4): Xaa is C or S
KAXXAPTKLEPISVLYL

SEQ ID NO: 9504 - protein, 23 aa, Artificial Sequence
  Cyclic GFR-binding peptide
  MOD_RES (6)..(7): Xaa is C or S
KVGKAXXVPTKLSPISVLYIDDM

SEQ ID NO: 9505 - protein, 24 aa, Artificial Sequence
  Cyclic GFR-binding peptide
  MOD_RES (6)..(7): Xaa is C or S
AAPASXXVPARLNAISILYFDAAN

SEQ ID NO: 9506 - protein, 15 aa, Artificial Sequence
  Cyclic GFR-binding peptide
EPISVLYLDDSSNVI

SEQ ID NO: 9507 - protein, 15 aa, Artificial Sequence
  Cyclic GFR-binding peptide
  MOD_RES (1)..(2): Xaa is C or S
XXVPTELEPISMLYL

SEQ ID NO: 9508 - protein, 17 aa, Artificial Sequence
  Cyclic GFR-binding peptide
DLEPISILYLVGRTPKV

SEQ ID NO: 9509 - protein, 19 aa, Artificial Sequence
  Cyclic GFR-binding peptide
PARLNAISILYFDAANNVV

SEQ ID NO: 9510 - protein, 24 aa, Artificial Sequence
  Cyclic GFR-binding peptide
  MOD_RES (6)..(7): Xaa is C or S
KVGKAXXVPTKLEPISVLYLDDMG

SEQ ID NO: 9511 - protein, 25 aa, Artificial Sequence
  Cyclic GFR-binding peptide
  MOD_RES (6)..(7): Xaa is C or S
ASAAPXXVPQALEPISILYLVGRKP

SEQ ID NO: 9512 - protein, 15 aa, Artificial Sequence
  Cyclic GFR-binding peptide
  MOD_RES (1)..(2): Xaa is C or S
XXVPQDLEPISILYL

SEQ ID NO: 9513 - protein, 18 aa, Artificial Sequence
  Cyclic GFR-binding peptide
QALSPISILYIVGRKPKV

SEQ ID NO: 9514 - protein, 14 aa, Artificial Sequence
  Cyclic GFR-binding peptide
  MOD_RES (1)..(1): Xaa is C or S
XAPTQLEPISVLYL

SEQ ID NO: 9515 - protein, 17 aa, Artificial Sequence
  Cyclic GFR-binding peptide
DLSPISILYIIGKTPKI

SEQ ID NO: 9516 - protein, 26 aa, Artificial Sequence
  Cyclic GFR-binding peptide
  MOD_RES (6)..(7): Xaa is C or S
ASASPXXVSQDLEPISILYLIGKTPK

SEQ ID NO: 9517 - protein, 17 aa, Artificial Sequence
  Cyclic GFR-binding peptide
RLNAISILYFDAANNVV

SEQ ID NO: 9518 - protein, 21 aa, Artificial Sequence
  Cyclic GFR-binding peptide
  MOD_RES (6)..(7): Xaa is C or S
KIPKAXXVPTELSPISMLYID

SEQ ID NO: 9519 - protein, 22 aa, Artificial Sequence
  Cyclic GFR-binding peptide
  MOD_RES (6)..(7): Xaa is C or S
KVGKAXXVPTKLSPISVLYIDD

SEQ ID NO: 9520 - protein, 19 aa, Artificial Sequence
  Cyclic GFR-binding peptide
  MOD_RES (5)..(6): Xaa is C or S
SAAPXXVPQALEPISILYL

SEQ ID NO: 9521 - protein, 27 aa, Artificial Sequence
  Cyclic GFR-binding peptide
  MOD_RES (6)..(7): Xaa is C or S
ASASPXXVSQDLSPISILYIIGKTPKI

SEQ ID NO: 9522 - protein, 17 aa, Artificial Sequence
  Cyclic GFR-binding peptide
KLEPISVLYLDSSNNVI

SEQ ID NO: 9523 - protein, 27 aa, Artificial Sequence
  Cyclic GFR-binding peptide
  MOD_RES (7)..(7): Xaa is C or S
HVTKPTXAPTKLSPISVLYIDDSSNVI

SEQ ID NO: 9524 - protein, 24 aa, Artificial Sequence
  Cyclic GFR-binding peptide
  MOD_RES (7)..(7): Xaa is C or S
HVTKPTXAPTKLSPISVLYIDDSS

SEQ ID NO: 9525 - protein, 23 aa, Artificial Sequence
  Cyclic GFR-binding peptide
  MOD_RES (6)..(7): Xaa is C or S
KIPKAXXVPTELSPISMLYIDEN

SEQ ID NO: 9526 - protein, 27 aa, Artificial Sequence
  Cyclic GFR-binding peptide
  MOD_RES (6)..(7): Xaa is C or S
KIPKAXXVPTELEPISMLYLDENEKVV

SEQ ID NO: 9527 - protein, 16 aa, Artificial Sequence
  Cyclic GFR-binding peptide
LEPISVLYLDSSNNVI

SEQ ID NO: 9528 - protein, 19 aa, Artificial Sequence
  Cyclic GFR-binding peptide
PTKLNAISILYFDKGVVTY

SEQ ID NO: 9529 - protein, 16 aa, Artificial Sequence
  Cyclic GFR-binding peptide
  MOD_RES (2)..(3): Xaa is C or S
PXXAPTKLEPISVLYL

SEQ ID NO: 9530 - protein, 21 aa, Artificial Sequence
  Cyclic GFR-binding peptide
  MOD_RES (7)..(7): Xaa is C or S
HVTKPTXAPTKLSPISVLYID

SEQ ID NO: 9531 - protein, 17 aa, Artificial Sequence
  Cyclic GFR-binding peptide
  MOD_RES (3)..(4): Xaa is C or S
KAXXVPTELSPISMLYI

SEQ ID NO: 9532 - protein, 15 aa, Artificial Sequence
  Cyclic GFR-binding peptide
SPISVLYIDSSNNVI

SEQ ID NO: 9533 - protein, 19 aa, Artificial Sequence
  Cyclic GFR-binding peptide
PTELSPISMLYIDEYDKVV

SEQ ID NO: 9534 - protein, 27 aa, Artificial Sequence
  Cyclic GFR-binding peptide
  MOD_RES (6)..(7): Xaa is C or S
AAPASXXVPARLEPISILYLDAANNVV

SEQ ID NO: 9535 - protein, 19 aa, Artificial Sequence
  Cyclic GFR-binding peptide
PARLEPISILYLDAANNVV

SEQ ID NO: 9536 - protein, 24 aa, Artificial Sequence
  Cyclic GFR-binding peptide
  MOD_RES (6)..(7): Xaa is C or S
ASASPXXVPQDLEPISILYLVGRT

SEQ ID NO: 9537 - protein, 19 aa, Artificial Sequence
  Cyclic GFR-binding peptide
PQALEPISILYLVGRKPKV

SEQ ID NO: 9538 - protein, 19 aa, Artificial Sequence
  Cyclic GFR-binding peptide
  MOD_RES (5)..(6): Xaa is C or S
SASPXXVPQDLEPISILYL

SEQ ID NO: 9539 - protein, 20 aa, Artificial Sequence
  Cyclic GFR-binding peptide
  MOD_RES (6)..(7): Xaa is C or S
KVGKAXXVPTKLEPISVLYL

SEQ ID NO: 9540 - protein, 20 aa, Artificial Sequence
  Cyclic GFR-binding peptide
  MOD_RES (6)..(7): Xaa is C or S
TVPKPXXAPTQLSPISVLYI

SEQ ID NO: 9541 - protein, 17 aa, Artificial Sequence
  Cyclic GFR-binding peptide
  MOD_RES (3)..(4): Xaa is C or S
APXXVPQALEPISILYL

SEQ ID NO: 9542 - protein, 14 aa, Artificial Sequence
  Cyclic GFR-binding peptide
  MOD_RES (1)..(1): Xaa is C or S
XVPTKLSPISVLYI

SEQ ID NO: 9543 - protein, 24 aa, Artificial Sequence
  Cyclic GFR-binding peptide
  MOD_RES (6)..(7): Xaa is C or S
AAPASXXVPARLSPISILYKDAAN

SEQ ID NO: 9544 - protein, 23 aa, Artificial Sequence
  Cyclic GFR-binding peptide
  MOD_RES (6)..(7): Xaa is C or S
KASKAXXVPTKLSPISILYKDKG

SEQ ID NO: 9545 - protein, 24 aa, Artificial Sequence
  Cyclic GFR-binding peptide
  MOD_RES (6)..(7): Xaa is C or S
AAPASXXVPARLEPISILYLDAAN

SEQ ID NO: 9546 - protein, 21 aa, Artificial Sequence
  Cyclic GFR-binding peptide
  MOD_RES (6)..(7): Xaa is C or S
KASKAXXVPTKLNAISILYFD

SEQ ID NO: 9547 - protein, 27 aa, Artificial Sequence
  Cyclic GFR-binding peptide
  MOD_RES (7)..(7): Xaa is C or S
HVTKPTXAPTKLEPISVLYLDDSSNVI

SEQ ID NO: 9548 - protein, 20 aa, Artificial Sequence
  Cyclic GFR-binding peptide
  MOD_RES (6)..(7): Xaa is C or S
AVPKAXXAPTKLSPISVLYI

SEQ ID NO: 9549 - protein, 17 aa, Artificial Sequence
  Cyclic GFR-binding peptide
KLEPISVLYLDDSSNVI

SEQ ID NO: 9550 - protein, 17 aa, Artificial Sequence
  Cyclic GFR-binding peptide
QLEPISVLYLDDSSNVI

SEQ ID NO: 9551 - protein, 20 aa, Artificial Sequence
  Cyclic GFR-binding peptide
  MOD_RES (6)..(7): Xaa is C or S
TVPKPXXAPTQLEPISVLYL

SEQ ID NO: 9552 - protein, 19 aa, Artificial Sequence
  Cyclic GFR-binding peptide
  MOD_RES (5)..(6): Xaa is C or S
VPKPXXAPTQLEPISVLYL

SEQ ID NO: 9553 - protein, 23 aa, Artificial Sequence
  Cyclic GFR-binding peptide
  MOD_RES (7)..(7): Xaa is C or S
HVTKPTXAPTKLSPISVLYIDDS

SEQ ID NO: 9554 - protein, 19 aa, Artificial Sequence
  Cyclic GFR-binding peptide
  MOD_RES (5)..(6): Xaa is C or S
SASPXXVSQDLSPISILYI

SEQ ID NO: 9555 - protein, 16 aa, Artificial Sequence
  Cyclic GFR-binding peptide
LSPISVLYIDSSNNVI

SEQ ID NO: 9556 - protein, 22 aa, Artificial Sequence
  Cyclic GFR-binding peptide
  MOD_RES (7)..(7): Xaa is C or S
HVTKPTXAPTKLSPISVLYIDD

SEQ ID NO: 9557 - protein, 15 aa, Artificial Sequence
  Cyclic GFR-binding peptide
EPISVLYLDSSNNVI

SEQ ID NO: 9558 - protein, 23 aa, Artificial Sequence
  Cyclic GFR-binding peptide
  MOD_RES (6)..(7): Xaa is C or S
YVPKPXXAPTKLEPISVLYLDDS

SEQ ID NO: 9559 - protein, 22 aa, Artificial Sequence
  Cyclic GFR-binding peptide
  MOD_RES (6)..(7): Xaa is C or S
KIPKAXXVPTELEPISMLYLDE

SEQ ID NO: 9560 - protein, 17 aa, Artificial Sequence
  Cyclic GFR-binding peptide
KLSPISVLYIDSSNNVI

SEQ ID NO: 9561 - protein, 13 aa, Artificial Sequence
  Cyclic GFR-binding peptide
VPTKLNAISILYF

SEQ ID NO: 9562 - protein, 25 aa, Artificial Sequence
  Cyclic GFR-binding peptide
  MOD_RES (6)..(7): Xaa is C or S
YVPKPXXAPTKLEPISVLYLDDSSN

SEQ ID NO: 9563 - protein, 15 aa, Artificial Sequence
  Cyclic GFR-binding peptide
  MOD_RES (1)..(2): Xaa is C or S
XXVPTKLNAISILYF

SEQ ID NO: 9564 - protein, 16 aa, Artificial Sequence
  Cyclic GFR-binding peptide
LEPISILYLDAANNVV

SEQ ID NO: 9565 - protein, 18 aa, Artificial Sequence
  Cyclic GFR-binding peptide
TKLSPISILYKDKGVVTY

SEQ ID NO: 9566 - protein, 27 aa, Artificial Sequence
  Cyclic GFR-binding peptide
  MOD_RES (6)..(7): Xaa is C or S
ASAAPXXVPQALEPISILYLVGRKPKV

SEQ ID NO: 9567 - protein, 15 aa, Artificial Sequence
  Cyclic GFR-binding peptide
NAISILYFDKGVVTY

SEQ ID NO: 9568 - protein, 25 aa, Artificial Sequence
  Cyclic GFR-binding peptide
  MOD_RES (6)..(7): Xaa is C or S
ASASPXXVPQDLEPISILYLVGRTP

SEQ ID NO: 9569 - protein, 22 aa, Artificial Sequence
  Cyclic GFR-binding peptide
  MOD_RES (6)..(7): Xaa is C or S
SIPKAXXVPTELSPISMLYIDE

SEQ ID NO: 9570 - protein, 22 aa, Artificial Sequence
  Cyclic GFR-binding peptide
  MOD_RES (6)..(7): Xaa is C or S
ASAAPXXVPQALEPISILYLVG

SEQ ID NO: 9571 - protein, 20 aa, Artificial Sequence
  Cyclic GFR-binding peptide
  MOD_RES (6)..(7): Xaa is C or S
ASASPXXVPQDLSPISILYI

SEQ ID NO: 9572 - protein, 25 aa, Artificial Sequence
  Cyclic GFR-binding peptide
  MOD_RES (6)..(7): Xaa is C or S
KVGKAXXVPTKLSPISVLYIDDMGV

SEQ ID NO: 9573 - protein, 17 aa, Artificial Sequence
  Cyclic GFR-binding peptide
  MOD_RES (3)..(4): Xaa is C or S
KAXXVPTKLEPISVLYL

SEQ ID NO: 9574 - protein, 25 aa, Artificial Sequence
  Cyclic GFR-binding peptide
  MOD_RES (6)..(7): Xaa is C or S
ASASPXXVPQDLSPISILYIVGRTP

SEQ ID NO: 9575 - protein, 26 aa, Artificial Sequence
  Cyclic GFR-binding peptide
  MOD_RES (6)..(7): Xaa is C or S
KASKAXXVPTKLSPISILYKDKGVVT

SEQ ID NO: 9576 - protein, 14 aa, Artificial Sequence
  Cyclic GFR-binding peptide
  MOD_RES (1)..(1): Xaa is C or S
XVPQALEPISILYL

SEQ ID NO: 9577 - protein, 27 aa, Artificial Sequence
  Cyclic GFR-binding peptide
  MOD_RES (6)..(7): Xaa is C or S
AAPASXXVPARLSPISILYKDAANNVV

SEQ ID NO: 9578 - protein, 18 aa, Artificial Sequence
  Cyclic GFR-binding peptide
  MOD_RES (5)..(5): Xaa is C or S
TKPTXAPTKLEPISVLYL

SEQ ID NO: 9579 - protein, 17 aa, Artificial Sequence
  Cyclic GFR-binding peptide
DLEPISILYLIGKTPKI

SEQ ID NO: 9580 - protein, 19 aa, Artificial Sequence
  Cyclic GFR-binding peptide
PTQLEPISVLYLDDSSNVI

SEQ ID NO: 9581 - protein, 17 aa, Artificial Sequence
  Cyclic GFR-binding peptide
  MOD_RES (3)..(4): Xaa is C or S
KPXXAPTQLEPISVLYL

SEQ ID NO: 9582 - protein, 24 aa, Artificial Sequence
  Cyclic GFR-binding peptide
  MOD_RES (6)..(7): Xaa is C or S
AVPKAXXAPTKLSPISVLYIDSSN

SEQ ID NO: 9583 - protein, 26 aa, Artificial Sequence
  Cyclic GFR-binding peptide
  MOD_RES (6)..(7): Xaa is C or S
YVPKPXXAPTKLSPISVLYIDDSSNV

SEQ ID NO: 9584 - protein, 16 aa, Artificial Sequence
  Cyclic GFR-binding peptide
LEPISVLYLDDSSNVI

SEQ ID NO: 9585 - protein, 27 aa, Artificial Sequence
  Cyclic GFR-binding peptide
  MOD_RES (6)..(7): Xaa is C or S
SIPKAXXVPTELEPISMLYLDEYDKVV

SEQ ID NO: 9586 - protein, 18 aa, Artificial Sequence
  Cyclic GFR-binding peptide
QDLSPISILYIVGRTPKV

SEQ ID NO: 9587 - protein, 19 aa, Artificial Sequence
  Cyclic GFR-binding peptide
PTKLSPISVLYIDSSNNVI

SEQ ID NO: 9588 - protein, 23 aa, Artificial Sequence
  Cyclic GFR-binding peptide
  MOD_RES (6)..(7): Xaa is C or S
AAPASXXVPARLEPISILYLDAA

SEQ ID NO: 9589 - protein, 16 aa, Artificial Sequence
  Cyclic GFR-binding peptide
  MOD_RES (2)..(3): Xaa is C or S
AXXVPTELEPISMLYL

SEQ ID NO: 9590 - protein, 24 aa, Artificial Sequence
  Cyclic GFR-binding peptide
  MOD_RES (6)..(7): Xaa is C or S
AVPKAXXAPTKLEPISVLYLDSSN

SEQ ID NO: 9591 - protein, 23 aa, Artificial Sequence
  Cyclic GFR-binding peptide
  MOD_RES (6)..(7): Xaa is C or S
ASASPXXVSQDLEPISILYLIGK

SEQ ID NO: 9592 - protein, 15 aa, Artificial Sequence
  Cyclic GFR-binding peptide
SPISMLYIDEYDKVV

SEQ ID NO: 9593 - protein, 22 aa, Artificial Sequence
  Cyclic GFR-binding peptide
  MOD_RES (6)..(7): Xaa is C or S
ASAAPXXVPQALSPISILYIVG

SEQ ID NO: 9594 - protein, 21 aa, Artificial Sequence
  Cyclic GFR-binding peptide
  MOD_RES (6)..(7): Xaa is C or S
KASKAXXVPTKLSPISILYID

SEQ ID NO: 9595 - protein, 13 aa, Artificial Sequence
  Cyclic GFR-binding peptide
APTQLEPISVLYL

SEQ ID NO: 9596 - protein, 14 aa, Artificial Sequence
  Cyclic GFR-binding peptide
  MOD_RES (1)..(1): Xaa is C or S
XVPQDLEPISILYL

SEQ ID NO: 9597 - protein, 19 aa, Artificial Sequence
  Cyclic GFR-binding peptide
  MOD_RES (5)..(6): Xaa is C or S
VPKAXXAPTKLEPISVLYL

SEQ ID NO: 9598 - protein, 15 aa, Artificial Sequence
  Cyclic GFR-binding peptide
  MOD_RES (1)..(2): Xaa is C or S
XXAPTQLEPISVLYL

SEQ ID NO: 9599 - protein, 21 aa, Artificial Sequence
  Cyclic GFR-binding peptide
  MOD_RES (6)..(7): Xaa is C or S
ASAAPXXVPQALSPISILYIV

SEQ ID NO: 9600 - protein, 26 aa, Artificial Sequence
  Cyclic GFR-binding peptide
  MOD_RES (6)..(7): Xaa is C or S
AVPKAXXAPTKLEPISVLYLDSSNNV

SEQ ID NO: 9601 - protein, 20 aa, Artificial Sequence
  Cyclic GFR-binding peptide
  MOD_RES (6)..(7): Xaa is C or S
KASKAXXVPTKLSPISILYK

SEQ ID NO: 9602 - protein, 20 aa, Artificial Sequence
  Cyclic GFR-binding peptide
  MOD_RES (6)..(7): Xaa is C or S
KASKAXXVPTKLSPISILYI

SEQ ID NO: 9603 - protein, 13 aa, Artificial Sequence
  Cyclic GFR-binding peptide
VPARLEPISILYL

SEQ ID NO: 9604 - protein, 15 aa, Artificial Sequence
  Cyclic GFR-binding peptide
  MOD_RES (1)..(2): Xaa is C or S
XXAPTKLSPISVLYI

SEQ ID NO: 9605 - protein, 19 aa, Artificial Sequence
  Cyclic GFR-binding peptide
  MOD_RES (5)..(6): Xaa is C or S
APASXXVPARLEPISILYL

SEQ ID NO: 9606 - protein, 16 aa, Artificial Sequence
  Cyclic GFR-binding peptide
  MOD_RES (2)..(3): Xaa is C or S
PXXAPTKLSPISVLYI

SEQ ID NO: 9607 - protein, 22 aa, Artificial Sequence
  Cyclic GFR-binding peptide
  MOD_RES (6)..(7): Xaa is C or S
YVPKPXXAPTKLEPISVLYLDD

SEQ ID NO: 9608 - protein, 19 aa, Artificial Sequence
  Cyclic GFR-binding peptide
  MOD_RES (5)..(6): Xaa is C or S
SAAPXXVPQALSPISILYI

SEQ ID NO: 9609 - protein, 18 aa, Artificial Sequence
  Cyclic GFR-binding peptide
  MOD_RES (4)..(5): Xaa is C or S
PKAXXVPTELEPISMLYL

SEQ ID NO: 9610 - protein, 17 aa, Artificial Sequence
  Cyclic GFR-binding peptide
DLSPISILYIVGRTPKV

SEQ ID NO: 9611 - protein, 21 aa, Artificial Sequence
  Cyclic GFR-binding peptide
  MOD_RES (6)..(7): Xaa is C or S
AAPASXXVPARLSPISILYKD

SEQ ID NO: 9612 - protein, 13 aa, Artificial Sequence
  Cyclic GFR-binding peptide
VPQDLSPISILYI

SEQ ID NO: 9613 - protein, 14 aa, Artificial Sequence
  Cyclic GFR-binding peptide
  MOD_RES (1)..(1): Xaa is C or S
XAPTQLSPISVLYI

SEQ ID NO: 9614 - protein, 15 aa, Artificial Sequence
  Cyclic GFR-binding peptide
  MOD_RES (1)..(2): Xaa is C or S
XXVPTKLSPISVLYI

SEQ ID NO: 9615 - protein, 15 aa, Artificial Sequence
  Cyclic GFR-binding peptide
SPISVLYIDDMGVPT

SEQ ID NO: 9616 - protein, 22 aa, Artificial Sequence
  Cyclic GFR-binding peptide
  MOD_RES (6)..(7): Xaa is C or S
TVPKPXXAPTQLEPISVLYLDD

SEQ ID NO: 9617 - protein, 18 aa, Artificial Sequence
  Cyclic GFR-binding peptide
QALEPISILYLVGRKPKV

SEQ ID NO: 9618 - protein, 16 aa, Artificial Sequence
  Cyclic GFR-binding peptide
LEPISILYLIGKTPKI

SEQ ID NO: 9619 - protein, 18 aa, Artificial Sequence
  Cyclic GFR-binding peptide
  MOD_RES (4)..(5): Xaa is C or S
PKPXXAPTKLEPISVLYL

SEQ ID NO: 9620 - protein, 20 aa, Artificial Sequence
  Cyclic GFR-binding peptide
  MOD_RES (6)..(7): Xaa is C or S
SIPKAXXVPTELSPISMLYI

SEQ ID NO: 9621 - protein, 23 aa, Artificial Sequence
  Cyclic GFR-binding peptide
  MOD_RES (6)..(7): Xaa is C or S
SIPKAXXVPTELEPISMLYLDEY

SEQ ID NO: 9622 - protein, 24 aa, Artificial Sequence
  Cyclic GFR-binding peptide
  MOD_RES (6)..(7): Xaa is C or S
ASAAPXXVPQALEPISILYLVGRK

SEQ ID NO: 9623 - protein, 18 aa, Artificial Sequence
  Cyclic GFR-binding peptide
  MOD_RES (4)..(5): Xaa is C or S
GKAXXVPTKLEPISVLYL

SEQ ID NO: 9624 - protein, 19 aa, Artificial Sequence
  Cyclic GFR-binding peptide
  MOD_RES (5)..(6): Xaa is C or S
SASPXXVPQDLSPISILYI

SEQ ID NO: 9625 - protein, 20 aa, Artificial Sequence
  Cyclic GFR-binding peptide
  MOD_RES (6)..(7): Xaa is C or S
KASKAXXVPTKLNAISILYF

SEQ ID NO: 9626 - protein, 22 aa, Artificial Sequence
  Cyclic GFR-binding peptide
  MOD_RES (6)..(7): Xaa is C or S
YVPKPXXAPTKLSPISVLYIDD

SEQ ID NO: 9627 - protein, 20 aa, Artificial Sequence
  Cyclic GFR-binding peptide
  MOD_RES (6)..(7): Xaa is C or S
YVPKPXXAPTKLSPISVLYI

SEQ ID NO: 9628 - protein, 16 aa, Artificial Sequence
  Cyclic GFR-binding peptide
  MOD_RES (2)..(3): Xaa is C or S
AXXVPTKLNAISILYF

SEQ ID NO: 9629 - protein, 16 aa, Artificial Sequence
  Cyclic GFR-binding peptide
LSPISMLYIDENEKVV

SEQ ID NO: 9630 - protein, 15 aa, Artificial Sequence
  Cyclic GFR-binding peptide
EPISMLYLDEYDKVV

SEQ ID NO: 9631 - protein, 25 aa, Artificial Sequence
  Cyclic GFR-binding peptide
  MOD_RES (6)..(7): Xaa is C or S
ASASPXXVSQDLSPISILYIIGKTP

SEQ ID NO: 9632 - protein, 17 aa, Artificial Sequence
  Cyclic GFR-binding peptide
  MOD_RES (3)..(4): Xaa is C or S
ASXXVPARLNAISILYF

SEQ ID NO: 9633 - protein, 23 aa, Artificial Sequence
  Cyclic GFR-binding peptide
  MOD_RES (6)..(7): Xaa is C or S
AVPKAXXAPTKLSPISVLYIDSS

SEQ ID NO: 9634 - protein, 24 aa, Artificial Sequence
  Cyclic GFR-binding peptide
  MOD_RES (6)..(7): Xaa is C or S
ASASPXXVPQDLSPISILYIVGRT

SEQ ID NO: 9635 - protein, 19 aa, Artificial Sequence
  Cyclic GFR-binding peptide
  MOD_RES (5)..(6): Xaa is C or S
VPKPXXAPTQLSPISVLYI

SEQ ID NO: 9636 - protein, 19 aa, Artificial Sequence
  Cyclic GFR-binding peptide
  MOD_RES (5)..(6): Xaa is C or S
ASKAXXVPTKLNAISILYF

SEQ ID NO: 9637 - protein, 22 aa, Artificial Sequence
  Cyclic GFR-binding peptide
  MOD_RES (6)..(7): Xaa is C or S
TVPKPXXAPTQLSPISVLYIDD

SEQ ID NO: 9638 - protein, 25 aa, Artificial Sequence
  Cyclic GFR-binding peptide
  MOD_RES (6)..(7): Xaa is C or S
AVPKAXXAPTKLEPISVLYLDSSNN

SEQ ID NO: 9639 - protein, 24 aa, Artificial Sequence
  Cyclic GFR-binding peptide
  MOD_RES (6)..(7): Xaa is C or S
KVGKAXXVPTKLSPISVLYIDDMG

SEQ ID NO: 9640 - protein, 19 aa, Artificial Sequence
  Cyclic GFR-binding peptide
  MOD_RES (5)..(6): Xaa is C or S
VPKPXXAPTKLSPISVLYI

SEQ ID NO: 9641 - protein, 17 aa, Artificial Sequence
  Cyclic GFR-binding peptide
  MOD_RES (3)..(4): Xaa is C or S
KAXXVPTKLSPISVLYI

SEQ ID NO: 9642 - protein, 16 aa, Artificial Sequence
  Cyclic GFR-binding peptide
  MOD_RES (3)..(3): Xaa is C or S
PTXAPTKLSPISVLYI

SEQ ID NO: 9643 - protein, 19 aa, Artificial Sequence
  Cyclic GFR-binding peptide
PTKLSPISVLYIDDSSNVI

SEQ ID NO: 9644 - protein, 25 aa, Artificial Sequence
  Cyclic GFR-binding peptide
  MOD_RES (6)..(7): Xaa is C or S
AAPASXXVPARLEPISILYLDAANN

SEQ ID NO: 9645 - protein, 27 aa, Artificial Sequence
  Cyclic GFR-binding peptide
  MOD_RES (6)..(7): Xaa is C or S
KVGKAXXVPTKLEPISVLYLDDMGVPT

SEQ ID NO: 9646 - protein, 27 aa, Artificial Sequence
  Cyclic GFR-binding peptide
  MOD_RES (6)..(7): Xaa is C or S
AAPASXXVPARLNAISILYFDAANNVV

SEQ ID NO: 9647 - protein, 19 aa, Artificial Sequence
  Cyclic GFR-binding peptide
PTQLSPISVLYIDDSSNVI

SEQ ID NO: 9648 - protein, 25 aa, Artificial Sequence
  Cyclic GFR-binding peptide
  MOD_RES (7)..(7): Xaa is C or S
HVTKPTXAPTKLSPISVLYIDDSSN

SEQ ID NO: 9649 - protein, 15 aa, Artificial Sequence
  Cyclic GFR-binding peptide
  MOD_RES (1)..(2): Xaa is C or S
XXVPQALEPISILYL

SEQ ID NO: 9650 - protein, 13 aa, Artificial Sequence
  Cyclic GFR-binding peptide
VSQDLSPISILYI

SEQ ID NO: 9651 - protein, 24 aa, Artificial Sequence
  Cyclic GFR-binding peptide
  MOD_RES (7)..(7): Xaa is C or S
HVTKPTXAPTKLEPISVLYLDDSS

SEQ ID NO: 9652 - protein, 20 aa, Artificial Sequence
  Cyclic GFR-binding peptide
  MOD_RES (6)..(7): Xaa is C or S
ASASPXXVSQDLSPISILYI

SEQ ID NO: 9653 - protein, 17 aa, Artificial Sequence
  Cyclic GFR-binding peptide
KLSPISVLYIDDMGVPT

SEQ ID NO: 9654 - protein, 21 aa, Artificial Sequence
  Cyclic GFR-binding peptide
  MOD_RES (6)..(7): Xaa is C or S
TVPKPXXAPTQLSPISVLYID

SEQ ID NO: 9655 - protein, 16 aa, Artificial Sequence
  Cyclic GFR-binding peptide
LSPISMLYIDEYDKVV

SEQ ID NO: 9656 - protein, 21 aa, Artificial Sequence
  Cyclic GFR-binding peptide
  MOD_RES (6)..(7): Xaa is C or S
SIPKAXXVPTELSPISMLYID

SEQ ID NO: 9657 - protein, 16 aa, Artificial Sequence
  Cyclic GFR-binding peptide
  MOD_RES (2)..(3): Xaa is C or S
PXXAPTQLSPISVLYI

SEQ ID NO: 9658 - protein, 18 aa, Artificial Sequence
  Cyclic GFR-binding peptide
QDLSPISILYIIGKTPKI

SEQ ID NO: 9659 - protein, 18 aa, Artificial Sequence
  Cyclic GFR-binding peptide
  MOD_RES (4)..(5): Xaa is C or S
AAPXXVPQALEPISILYL

SEQ ID NO: 9660 - protein, 15 aa, Artificial Sequence
  Cyclic GFR-binding peptide
  MOD_RES (1)..(2): Xaa is C or S
XXVPTKLSPISILYI

SEQ ID NO: 9661 - protein, 15 aa, Artificial Sequence
  Cyclic GFR-binding peptide
  MOD_RES (1)..(2): Xaa is C or S
XXVPTKLSPISILYK

SEQ ID NO: 9662 - protein, 21 aa, Artificial Sequence
  Cyclic GFR-binding peptide
  MOD_RES (6)..(7): Xaa is C or S
AAPASXXVPARLNAISILYFD

SEQ ID NO: 9663 - protein, 24 aa, Artificial Sequence
  Cyclic GFR-binding peptide
  MOD_RES (6)..(7): Xaa is C or S
SIPKAXXVPTELSPISMLYIDEYD

SEQ ID NO: 9664 - protein, 17 aa, Artificial Sequence
  Cyclic GFR-binding peptide
  MOD_RES (3)..(4): Xaa is C or S
SPXXVPQDLEPISILYL

SEQ ID NO: 9665 - protein, 22 aa, Artificial Sequence
  Cyclic GFR-binding peptide
  MOD_RES (7)..(7): Xaa is C or S
HVTKPTXAPTKLEPISVLYLDD

SEQ ID NO: 9666 - protein, 16 aa, Artificial Sequence
  Cyclic GFR-binding peptide
LEPISILYLVGRKPKV

SEQ ID NO: 9667 - protein, 25 aa, Artificial Sequence
  Cyclic GFR-binding peptide
  MOD_RES (6)..(7): Xaa is C or S
AVPKAXXAPTKLSPISVLYIDSSNN

SEQ ID NO: 9668 - protein, 19 aa, Artificial Sequence
  Cyclic GFR-binding peptide
PQDLSPISILYIVGRTPKV

SEQ ID NO: 9669 - protein, 27 aa, Artificial Sequence
  Cyclic GFR-binding peptide
  MOD_RES (6)..(7): Xaa is C or S
TVPKPXXAPTQLEPISVLYLDDSSNVI

SEQ ID NO: 9670 - protein, 25 aa, Artificial Sequence
  Cyclic GFR-binding peptide
  MOD_RES (6)..(7): Xaa is C or S
KASKAXXVPTKLSPISILYKDKGVV

SEQ ID NO: 9671 - protein, 23 aa, Artificial Sequence
  Cyclic GFR-binding peptide
  MOD_RES (6)..(7): Xaa is C or S
ASAAPXXVPQALSPISILYIVGR

SEQ ID NO: 9672 - protein, 14 aa, Artificial Sequence
  Cyclic GFR-binding peptide
  MOD_RES (1)..(1): Xaa is C or S
XVPTELEPISMLYL

SEQ ID NO: 9673 - protein, 18 aa, Artificial Sequence
  Cyclic GFR-binding peptide
ARLSPISILYKDAANNVV

SEQ ID NO: 9674 - protein, 17 aa, Artificial Sequence
  Cyclic GFR-binding peptide
ELEPISMLYLDEYDKVV

SEQ ID NO: 9675 - protein, 16 aa, Artificial Sequence
  Cyclic GFR-binding peptide
  MOD_RES (2)..(3): Xaa is C or S
PXXVSQDLEPISILYL

SEQ ID NO: 9676 - protein, 14 aa, Artificial Sequence
  Cyclic GFR-binding peptide
  MOD_RES (1)..(1): Xaa is C or S
XAPTKLSPISVLYI

SEQ ID NO: 9677 - protein, 16 aa, Artificial Sequence
  Cyclic GFR-binding peptide
  MOD_RES (2)..(3): Xaa is C or S
PXXVPQALEPISILYL

SEQ ID NO: 9678 - protein, 20 aa, Artificial Sequence
  Cyclic GFR-binding peptide
  MOD_RES (6)..(7): Xaa is C or S
ASASPXXVPQDLEPISILYL

SEQ ID NO: 9679 - protein, 22 aa, Artificial Sequence
  Cyclic GFR-binding peptide
  MOD_RES (6)..(7): Xaa is C or S
KASKAXXVPTKLSPISILYKDK

SEQ ID NO: 9680 - protein, 14 aa, Artificial Sequence
  Cyclic GFR-binding peptide
  MOD_RES (1)..(1): Xaa is C or S
XVPTKLEPISVLYL

SEQ ID NO: 9681 - protein, 19 aa, Artificial Sequence
  Cyclic GFR-binding peptide
PTELSPISMLYIDENEKVV

SEQ ID NO: 9682 - protein, 16 aa, Artificial Sequence
  Cyclic GFR-binding peptide
  MOD_RES (2)..(3): Xaa is C or S
AXXAPTKLEPISVLYL

SEQ ID NO: 9683 - protein, 17 aa, Artificial Sequence
  Cyclic GFR-binding peptide
  MOD_RES (3)..(4): Xaa is C or S
KAXXAPTKLSPISVLYI

SEQ ID NO: 9684 - protein, 24 aa, Artificial Sequence
  Cyclic GFR-binding peptide
  MOD_RES (6)..(7): Xaa is C or S
KIPKAXXVPTELSPISMLYIDENE

SEQ ID NO: 9685 - protein, 13 aa, Artificial Sequence
  Cyclic GFR-binding peptide
VPQALSPISILYI

SEQ ID NO: 9686 - protein, 15 aa, Artificial Sequence
  Cyclic GFR-binding peptide
  MOD_RES (1)..(2): Xaa is C or S
XXAPTQLSPISVLYI

SEQ ID NO: 9687 - protein, 17 aa, Artificial Sequence
  Cyclic GFR-binding peptide
RLEPISILYLDAANNVV

SEQ ID NO: 9688 - protein, 16 aa, Artificial Sequence
  Cyclic GFR-binding peptide
LNAISILYFDKGVVTY

SEQ ID NO: 9689 - protein, 27 aa, Artificial Sequence
  Cyclic GFR-binding peptide
  MOD_RES (6)..(7): Xaa is C or S
YVPKPXXAPTKLSPISVLYIDDSSNVI

SEQ ID NO: 9690 - protein, 21 aa, Artificial Sequence
  Cyclic GFR-binding peptide
  MOD_RES (6)..(7): Xaa is C or S
ASAAPXXVPQALEPISILYLV

SEQ ID NO: 9691 - protein, 15 aa, Artificial Sequence
  Cyclic GFR-binding peptide
  MOD_RES (1)..(2): Xaa is C or S
XXVSQDLEPISILYL

SEQ ID NO: 9692 - protein, 18 aa, Artificial Sequence
  Cyclic GFR-binding peptide
  MOD_RES (4)..(5): Xaa is C or S
PASXXVPARLEPISILYL

SEQ ID NO: 9693 - protein, 19 aa, Artificial Sequence
  Cyclic GFR-binding peptide
  MOD_RES (6)..(6): Xaa is C or S
VTKPTXAPTKLSPISVLYI

SEQ ID NO: 9694 - protein, 22 aa, Artificial Sequence
  Cyclic GFR-binding peptide
  MOD_RES (6)..(7): Xaa is C or S
KASKAXXVPTKLNAISILYFDK

SEQ ID NO: 9695 - protein, 18 aa, Artificial Sequence
  Cyclic GFR-binding peptide
  MOD_RES (4)..(5): Xaa is C or S
PKAXXAPTKLSPISVLYI

SEQ ID NO: 9696 - protein, 22 aa, Artificial Sequence
  Cyclic GFR-binding peptide
  MOD_RES (6)..(7): Xaa is C or S
ASASPXXVSQDLEPISILYLIG

SEQ ID NO: 9697 - protein, 18 aa, Artificial Sequence
  Cyclic GFR-binding peptide
ARLNAISILYFDAANNVV

SEQ ID NO: 9698 - protein, 20 aa, Artificial Sequence
  Cyclic GFR-binding peptide
  MOD_RES (6)..(7): Xaa is C or S
KIPKAXXVPTELSPISMLYI

SEQ ID NO: 9699 - protein, 18 aa, Artificial Sequence
  Cyclic GFR-binding peptide
  MOD_RES (4)..(5): Xaa is C or S
SKAXXVPTKLNAISILYF

SEQ ID NO: 9700 - protein, 27 aa, Artificial Sequence
  Cyclic GFR-binding peptide
  MOD_RES (6)..(7): Xaa is C or S
AVPKAXXAPTKLSPISVLYIDSSNNVI

SEQ ID NO: 9701 - protein, 18 aa, Artificial Sequence
  Cyclic GFR-binding peptide
TKLEPISVLYLDDMGVPT

SEQ ID NO: 9702 - protein, 15 aa, Artificial Sequence
  Cyclic GFR-binding peptide
EPISILYLDAANNVV

SEQ ID NO: 9703 - protein, 23 aa, Artificial Sequence
  Cyclic GFR-binding peptide
  MOD_RES (6)..(7): Xaa is C or S
KASKAXXVPTKLNAISILYFDKG

SEQ ID NO: 9704 - protein, 21 aa, Artificial Sequence
  Cyclic GFR-binding peptide
  MOD_RES (6)..(7): Xaa is C or S
KIPKAXXVPTELEPISMLYLD

SEQ ID NO: 9705 - protein, 19 aa, Artificial Sequence
  Cyclic GFR-binding peptide
PTKLSPISILYKDKGVVTY

SEQ ID NO: 9706 - protein, 19 aa, Artificial Sequence
  Cyclic GFR-binding peptide
  MOD_RES (5)..(6): Xaa is C or S
VGKAXXVPTKLSPISVLYI

SEQ ID NO: 9707 - protein, 27 aa, Artificial Sequence
  Cyclic GFR-binding peptide
  MOD_RES (6)..(7): Xaa is C or S
KIPKAXXVPTELSPISMLYIDENEKVV

SEQ ID NO: 9708 - protein, 25 aa, Artificial Sequence
  Cyclic GFR-binding peptide
  MOD_RES (7)..(7): Xaa is C or S
HVTKPTXAPTKLEPISVLYLDDSSN

SEQ ID NO: 9709 - protein, 19 aa, Artificial Sequence
  Cyclic GFR-binding peptide
  MOD_RES (5)..(6): Xaa is C or S
IPKAXXVPTELEPISMLYL

SEQ ID NO: 9710 - protein, 20 aa, Artificial Sequence
  Cyclic GFR-binding peptide
  MOD_RES (7)..(7): Xaa is C or S
HVTKPTXAPTKLSPISVLYI

SEQ ID NO: 9711 - protein, 23 aa, Artificial Sequence
  Cyclic GFR-binding peptide
  MOD_RES (6)..(7): Xaa is C or S
ASASPXXVSQDLSPISILYIIGK

SEQ ID NO: 9712 - protein, 22 aa, Artificial Sequence
  Cyclic GFR-binding peptide
  MOD_RES (6)..(7): Xaa is C or S
KASKAXXVPTKLSPISILYIDK

SEQ ID NO: 9713 - protein, 17 aa, Artificial Sequence
  Cyclic GFR-binding peptide
  MOD_RES (3)..(4): Xaa is C or S
KAXXVPTKLSPISILYK

SEQ ID NO: 9714 - protein, 17 aa, Artificial Sequence
  Cyclic GFR-binding peptide
  MOD_RES (3)..(4): Xaa is C or S
KAXXVPTKLSPISILYI

SEQ ID NO: 9715 - protein, 16 aa, Artificial Sequence
  Cyclic GFR-binding peptide
LSPISILYKDKGVVTY

SEQ ID NO: 9716 - protein, 22 aa, Artificial Sequence
  Cyclic GFR-binding peptide
  MOD_RES (6)..(7): Xaa is C or S
ASASPXXVSQDLSPISILYIIG

SEQ ID NO: 9717 - protein, 22 aa, Artificial Sequence
  Cyclic GFR-binding peptide
  MOD_RES (6)..(7): Xaa is C or S
AVPKAXXAPTKLSPISVLYIDS

SEQ ID NO: 9718 - protein, 21 aa, Artificial Sequence
  Cyclic GFR-binding peptide
  MOD_RES (6)..(7): Xaa is C or S
ASASPXXVSQDLSPISILYII

SEQ ID NO: 9719 - protein, 18 aa, Artificial Sequence
  Cyclic GFR-binding peptide
  MOD_RES (4)..(5): Xaa is C or S
ASPXXVSQDLSPISILYI

SEQ ID NO: 9720 - protein, 26 aa, Artificial Sequence
  Cyclic GFR-binding peptide
  MOD_RES (6)..(7): Xaa is C or S
AAPASXXVPARLNAISILYFDAANNV

SEQ ID NO: 9721 - protein, 15 aa, Artificial Sequence
  Cyclic GFR-binding peptide
  MOD_RES (1)..(2): Xaa is C or S
XXAPTKLEPISVLYL

SEQ ID NO: 9722 - protein, 21 aa, Artificial Sequence
  Cyclic GFR-binding peptide
  MOD_RES (6)..(7): Xaa is C or S
AAPASXXVPARLEPISILYLD

SEQ ID NO: 9723 - protein, 15 aa, Artificial Sequence
  Cyclic GFR-binding peptide
EPISMLYLDENEKVV

SEQ ID NO: 9724 - protein, 21 aa, Artificial Sequence
  Cyclic GFR-binding peptide
  MOD_RES (6)..(7): Xaa is C or S
KVGKAXXVPTKLSPISVLYID

SEQ ID NO: 9725 - protein, 19 aa, Artificial Sequence
  Cyclic GFR-binding peptide
  MOD_RES (5)..(6): Xaa is C or S
VPKPXXAPTKLEPISVLYL

SEQ ID NO: 9726 - protein, 26 aa, Artificial Sequence
  Cyclic GFR-binding peptide
  MOD_RES (6)..(7): Xaa is C or S
AAPASXXVPARLEPISILYLDAANNV

SEQ ID NO: 9727 - protein, 23 aa, Artificial Sequence
  Cyclic GFR-binding peptide
  MOD_RES (7)..(7): Xaa is C or S
HVTKPTXAPTKLEPISVLYLDDS

SEQ ID NO: 9728 - protein, 17 aa, Artificial Sequence
  Cyclic GFR-binding peptide
  MOD_RES (3)..(4): Xaa is C or S
ASXXVPARLEPISILYL

SEQ ID NO: 9729 - protein, 15 aa, Artificial Sequence
  Cyclic GFR-binding peptide
SPISILYIVGRTPKV

SEQ ID NO: 9730 - protein, 18 aa, Artificial Sequence
  Cyclic GFR-binding peptide
  MOD_RES (4)..(5): Xaa is C or S
PKAXXVPTELSPISMLYI

SEQ ID NO: 9731 - protein, 19 aa, Artificial Sequence
  Cyclic GFR-binding peptide
  MOD_RES (5)..(6): Xaa is C or S
VGKAXXVPTKLEPISVLYL

SEQ ID NO: 9732 - protein, 25 aa, Artificial Sequence
  Cyclic GFR-binding peptide
  MOD_RES (6)..(7): Xaa is C or S
ASAAPXXVPQALSPISILYIVGRKP

SEQ ID NO: 9733 - protein, 24 aa, Artificial Sequence
  Cyclic GFR-binding peptide
  MOD_RES (6)..(7): Xaa is C or S
SIPKAXXVPTELEPISMLYLDEYD

SEQ ID NO: 9734 - protein, 24 aa, Artificial Sequence
  Cyclic GFR-binding peptide
  MOD_RES (6)..(7): Xaa is C or S
KASKAXXVPTKLSPISILYIDKGV

SEQ ID NO: 9735 - protein, 24 aa, Artificial Sequence
  Cyclic GFR-binding peptide
  MOD_RES (6)..(7): Xaa is C or S
ASASPXXVSQDLEPISILYLIGKT

SEQ ID NO: 9736 - protein, 16 aa, Artificial Sequence
  Cyclic GFR-binding peptide
  MOD_RES (2)..(3): Xaa is C or S
PXXVPQDLEPISILYL

SEQ ID NO: 9737 - protein, 24 aa, Artificial Sequence
  Cyclic GFR-binding peptide
  MOD_RES (6)..(7): Xaa is C or S
TVPKPXXAPTQLSPISVLYIDDSS

SEQ ID NO: 9738 - protein, 16 aa, Artificial Sequence
  Cyclic GFR-binding peptide
LSPISILYIVGRKPKV

SEQ ID NO: 9739 - protein, 20 aa, Artificial Sequence
  Cyclic GFR-binding peptide
  MOD_RES (6)..(7): Xaa is C or S
ASASPXXVSQDLEPISILYL

SEQ ID NO: 9740 - protein, 16 aa, Artificial Sequence
  Cyclic GFR-binding peptide
LEPISILYLVGRTPKV

SEQ ID NO: 9741 - protein, 15 aa, Artificial Sequence
  Cyclic GFR-binding peptide
NAISILYFDAANNVV

SEQ ID NO: 9742 - protein, 26 aa, Artificial Sequence
  Cyclic GFR-binding peptide
  MOD_RES (6)..(7): Xaa is C or S
AVPKAXXAPTKLSPISVLYIDSSNNV

SEQ ID NO: 9743 - protein, 13 aa, Artificial Sequence
  Cyclic GFR-binding peptide
VPARLNAISILYF

SEQ ID NO: 9744 - protein, 20 aa, Artificial Sequence
  Cyclic GFR-binding peptide
  MOD_RES (6)..(7): Xaa is C or S
SIPKAXXVPTELEPISMLYL

SEQ ID NO: 9745 - protein, 20 aa, Artificial Sequence
  Cyclic GFR-binding peptide
  MOD_RES (6)..(7): Xaa is C or S
AAPASXXVPARLEPISILYL

SEQ ID NO: 9746 - protein, 20 aa, Artificial Sequence
  Cyclic GFR-binding peptide
  MOD_RES (7)..(7): Xaa is C or S
HVTKPTXAPTKLEPISVLYL

SEQ ID NO: 9747 - protein, 15 aa, Artificial Sequence
  Cyclic GFR-binding peptide
  MOD_RES (1)..(2): Xaa is C or S
XXVPARLSPISILYK

SEQ ID NO: 9748 - protein, 25 aa, Artificial Sequence
  Cyclic GFR-binding peptide
  MOD_RES (6)..(7): Xaa is C or S
KVGKAXXVPTKLEPISVLYLDDMGV

SEQ ID NO: 9749 - protein, 15 aa, Artificial Sequence
  Cyclic GFR-binding peptide
  MOD_RES (2)..(2): Xaa is C or S
TXAPTKLEPISVLYL

SEQ ID NO: 9750 - protein, 26 aa, Artificial Sequence
  Cyclic GFR-binding peptide
  MOD_RES (6)..(7): Xaa is C or S
KIPKAXXVPTELSPISMLYIDENEKV

SEQ ID NO: 9751 - protein, 23 aa, Artificial Sequence
  Cyclic GFR-binding peptide
  MOD_RES (6)..(7): Xaa is C or S
AAPASXXVPARLSPISILYKDAA

SEQ ID NO: 9752 - protein, 25 aa, Artificial Sequence
  Cyclic GFR-binding peptide
  MOD_RES (6)..(7): Xaa is C or S
YVPKPXXAPTKLSPISVLYIDDSSN

SEQ ID NO: 9753 - protein, 19 aa, Artificial Sequence
  Cyclic GFR-binding peptide
PTKLEPISVLYLDDMGVPT

SEQ ID NO: 9754 - protein, 22 aa, Artificial Sequence
  Cyclic GFR-binding peptide
  MOD_RES (6)..(7): Xaa is C or S
ASASPXXVPQDLSPISILYIVG

SEQ ID NO: 9755 - protein, 18 aa, Artificial Sequence
  Cyclic GFR-binding peptide
  MOD_RES (4)..(5): Xaa is C or S
PASXXVPARLNAISILYF

SEQ ID NO: 9756 - protein, 18 aa, Artificial Sequence
  Cyclic GFR-binding peptide
TELSPISMLYIDENEKVV

SEQ ID NO: 9757 - protein, 19 aa, Artificial Sequence
  Cyclic GFR-binding peptide
PTELEPISMLYLDENEKVV

SEQ ID NO: 9758 - protein, 15 aa, Artificial Sequence
  Cyclic GFR-binding peptide
SPISILYIDKGVVTY

SEQ ID NO: 9759 - protein, 13 aa, Artificial Sequence
  Cyclic GFR-binding peptide
VPTKLEPISVLYL

SEQ ID NO: 9760 - protein, 15 aa, Artificial Sequence
  Cyclic GFR-binding peptide
SPISILYKDAANNVV

SEQ ID NO: 9761 - protein, 13 aa, Artificial Sequence
  Cyclic GFR-binding peptide
VPARLSPISILYK

SEQ ID NO: 9762 - protein, 21 aa, Artificial Sequence
  Cyclic GFR-binding peptide
  MOD_RES (6)..(7): Xaa is C or S
AVPKAXXAPTKLEPISVLYLD

SEQ ID NO: 9763 - protein, 23 aa, Artificial Sequence
  Cyclic GFR-binding peptide
  MOD_RES (6)..(7): Xaa is C or S
KIPKAXXVPTELEPISMLYLDEN

SEQ ID NO: 9764 - protein, 15 aa, Artificial Sequence
  Cyclic GFR-binding peptide
  MOD_RES (1)..(2): Xaa is C or S
XXVPTKLEPISVLYL

SEQ ID NO: 9765 - protein, 25 aa, Artificial Sequence
  Cyclic GFR-binding peptide
  MOD_RES (6)..(7): Xaa is C or S
KASKAXXVPTKLNAISILYFDKGVV

SEQ ID NO: 9766 - protein, 17 aa, Artificial Sequence
  Cyclic GFR-binding peptide
  MOD_RES (3)..(4): Xaa is C or S
APXXVPQALSPISILYI

SEQ ID NO: 9767 - protein, 15 aa, Artificial Sequence
  Cyclic GFR-binding peptide
  MOD_RES (1)..(2): Xaa is C or S
XXVPARLNAISILYF

SEQ ID NO: 9768 - protein, 21 aa, Artificial Sequence
  Cyclic GFR-binding peptide
  MOD_RES (6)..(7): Xaa is C or S
YVPKPXXAPTKLEPISVLYLD

SEQ ID NO: 9769 - protein, 19 aa, Artificial Sequence
  Cyclic GFR-binding peptide
SQDLSPISILYIIGKTPKI

SEQ ID NO: 9770 - protein, 18 aa, Artificial Sequence
  Cyclic GFR-binding peptide
  MOD_RES (4)..(5): Xaa is C or S
GKAXXVPTKLSPISVLYI

SEQ ID NO: 9771 - protein, 18 aa, Artificial Sequence
  Cyclic GFR-binding peptide
TKLSPISVLYIDDMGVPT

SEQ ID NO: 9772 - protein, 26 aa, Artificial Sequence
  Cyclic GFR-binding peptide
  MOD_RES (6)..(7): Xaa is C or S
KVGKAXXVPTKLSPISVLYIDDMGVP

SEQ ID NO: 9773 - protein, 21 aa, Artificial Sequence
  Cyclic GFR-binding peptide
  MOD_RES (6)..(7): Xaa is C or S
ASASPXXVPQDLSPISILYIV

SEQ ID NO: 9774 - protein, 18 aa, Artificial Sequence
  Cyclic GFR-binding peptide
  MOD_RES (4)..(5): Xaa is C or S
ASPXXVPQDLSPISILYI

SEQ ID NO: 9775 - protein, 16 aa, Artificial Sequence
  Cyclic GFR-binding peptide
LSPISILYIVGRTPKV

SEQ ID NO: 9776 - protein, 17 aa, Artificial Sequence
  Cyclic GFR-binding peptide
  MOD_RES (3)..(4): Xaa is C or S
SPXXVPQDLSPISILYI

SEQ ID NO: 9777 - protein, 16 aa, Artificial Sequence
  Cyclic GFR-binding peptide
  MOD_RES (2)..(3): Xaa is C or S
PXXVPQALSPISILYI

SEQ ID NO: 9778 - protein, 16 aa, Artificial Sequence
  Cyclic GFR-binding peptide
  MOD_RES (2)..(3): Xaa is C or S
PXXAPTQLEPISVLYL

SEQ ID NO: 9779 - protein, 17 aa, Artificial Sequence
  Cyclic GFR-binding peptide
KLEPISVLYLDDMGVPT

SEQ ID NO: 9780 - protein, 24 aa, Artificial Sequence
  Cyclic GFR-binding peptide
  MOD_RES (6)..(7): Xaa is C or S
ASAAPXXVPQALSPISILYIVGRK

SEQ ID NO: 9781 - protein, 18 aa, Artificial Sequence
  Cyclic GFR-binding peptide
TELEPISMLYLDEYDKVV

SEQ ID NO: 9782 - protein, 18 aa, Artificial Sequence
  Cyclic GFR-binding peptide
TKLEPISVLYLDSSNNVI

SEQ ID NO: 9783 - protein, 27 aa, Artificial Sequence
  Cyclic GFR-binding peptide
  MOD_RES (6)..(7): Xaa is C or S
YVPKPXXAPTKLEPISVLYLDDSSNVI

SEQ ID NO: 9784 - protein, 17 aa, Artificial Sequence
  Cyclic GFR-binding peptide
  MOD_RES (3)..(4): Xaa is C or S
KPXXAPTKLEPISVLYL

SEQ ID NO: 9785 - protein, 15 aa, Artificial Sequence
  Cyclic GFR-binding peptide
SPISILYIIGKTPKI

SEQ ID NO: 9786 - protein, 25 aa, Artificial Sequence
  Cyclic GFR-binding peptide
  MOD_RES (6)..(7): Xaa is C or S
KIPKAXXVPTELSPISMLYIDENEK

SEQ ID NO: 9787 - protein, 22 aa, Artificial Sequence
  Cyclic GFR-binding peptide
  MOD_RES (6)..(7): Xaa is C or S
ASASPXXVPQDLEPISILYLVG

SEQ ID NO: 9788 - protein, 24 aa, Artificial Sequence
  Cyclic GFR-binding peptide
  MOD_RES (6)..(7): Xaa is C or S
KASKAXXVPTKLSPISILYKDKGV

SEQ ID NO: 9789 - protein, 17 aa, Artificial Sequence
  Cyclic GFR-binding peptide
KLSPISILYIDKGVVTY

SEQ ID NO: 9790 - protein, 16 aa, Artificial Sequence
  Cyclic GFR-binding peptide
LEPISMLYLDENEKVV

SEQ ID NO: 9791 - protein, 18 aa, Artificial Sequence
  Cyclic GFR-binding peptide
  MOD_RES (4)..(5): Xaa is C or S
ASPXXVPQDLEPISILYL

SEQ ID NO: 9792 - protein, 16 aa, Artificial Sequence
  Cyclic GFR-binding peptide
LSPISVLYIDDSSNVI

SEQ ID NO: 9793 - protein, 20 aa, Artificial Sequence
  Cyclic GFR-binding peptide
  MOD_RES (6)..(7): Xaa is C or S
ASAAPXXVPQALEPISILYL

SEQ ID NO: 9794 - protein, 17 aa, Artificial Sequence
  Cyclic GFR-binding peptide
ELEPISMLYLDENEKVV

SEQ ID NO: 9795 - protein, 16 aa, Artificial Sequence
  Cyclic GFR-binding peptide
LSPISILYIDKGVVTY

SEQ ID NO: 9796 - protein, 17 aa, Artificial Sequence
  Cyclic GFR-binding peptide
KLSPISVLYIDDSSNVI

SEQ ID NO: 9797 - protein, 17 aa, Artificial Sequence
  Cyclic GFR-binding peptide
QLSPISVLYIDDSSNVI

SEQ ID NO: 9798 - protein, 27 aa, Artificial Sequence
  Cyclic GFR-binding peptide
  MOD_RES (6)..(7): Xaa is C or S
ASASPXXVPQDLEPISILYLVGRTPKV

SEQ ID NO: 9799 - protein, 20 aa, Artificial Sequence
  Cyclic GFR-binding peptide
  MOD_RES (6)..(7): Xaa is C or S
KVGKAXXVPTKLSPISVLYI

SEQ ID NO: 9800 - protein, 26 aa, Artificial Sequence
  Cyclic GFR-binding peptide
  MOD_RES (6)..(7): Xaa is C or S
SIPKAXXVPTELSPISMLYIDEYDKV

SEQ ID NO: 9801 - protein, 17 aa, Artificial Sequence
  Cyclic GFR-binding peptide
  MOD_RES (3)..(4): Xaa is C or S
KAXXVPTELEPISMLYL

SEQ ID NO: 9802 - protein, 15 aa, Artificial Sequence
  Cyclic GFR-binding peptide
  MOD_RES (2)..(2): Xaa is C or S
TXAPTKLSPISVLYI

SEQ ID NO: 9803 - protein, 24 aa, Artificial Sequence
  Cyclic GFR-binding peptide
  MOD_RES (6)..(7): Xaa is C or S
YVPKPXXAPTKLSPISVLYIDDSS

SEQ ID NO: 9804 - protein, 15 aa, Artificial Sequence
  Cyclic GFR-binding peptide
EPISILYLVGRTPKV

SEQ ID NO: 9805 - protein, 24 aa, Artificial Sequence
  Cyclic GFR-binding peptide
  MOD_RES (6)..(7): Xaa is C or S
TVPKPXXAPTQLEPISVLYLDDSS

SEQ ID NO: 9806 - protein, 13 aa, Artificial Sequence
  Cyclic GFR-binding peptide
APTKLEPISVLYL

SEQ ID NO: 9807 - protein, 26 aa, Artificial Sequence
  Cyclic GFR-binding peptide
  MOD_RES (6)..(7): Xaa is C or S
ASAAPXXVPQALSPISILYIVGRKPK

SEQ ID NO: 9808 - protein, 22 aa, Artificial Sequence
  Cyclic GFR-binding peptide
  MOD_RES (6)..(7): Xaa is C or S
AAPASXXVPARLSPISILYKDA

SEQ ID NO: 9809 - protein, 22 aa, Artificial Sequence
  Cyclic GFR-binding peptide
  MOD_RES (6)..(7): Xaa is C or S
AAPASXXVPARLEPISILYLDA

SEQ ID NO: 9810 - protein, 16 aa, Artificial Sequence
  Cyclic GFR-binding peptide
LEPISVLYLDDMGVPT

SEQ ID NO: 9811 - protein, 15 aa, Artificial Sequence
  Cyclic GFR-binding peptide
  MOD_RES (1)..(2): Xaa is C or S
XXVPTELSPISMLYI

SEQ ID NO: 9812 - protein, 26 aa, Artificial Sequence
  Cyclic GFR-binding peptide
  MOD_RES (6)..(7): Xaa is C or S
AAPASXXVPARLSPISILYKDAANNV

SEQ ID NO: 9813 - protein, 21 aa, Artificial Sequence
  Cyclic GFR-binding peptide
  MOD_RES (6)..(7): Xaa is C or S
AVPKAXXAPTKLSPISVLYID

SEQ ID NO: 9814 - protein, 19 aa, Artificial Sequence
  Cyclic GFR-binding peptide
PTKLSPISILYIDKGVVTY

SEQ ID NO: 9815 - protein, 26 aa, Artificial Sequence
  Cyclic GFR-binding peptide
  MOD_RES (6)..(7): Xaa is C or S
YVPKPXXAPTKLEPISVLYLDDSSNV

SEQ ID NO: 9816 - protein, 14 aa, Artificial Sequence
  Cyclic GFR-binding peptide
  MOD_RES (1)..(1): Xaa is C or S
XVPTELSPISMLYI

SEQ ID NO: 9817 - protein, 16 aa, Artificial Sequence
  Cyclic GFR-binding peptide
  MOD_RES (2)..(3): Xaa is C or S
PXXVSQDLSPISILYI

SEQ ID NO: 9818 - protein, 23 aa, Artificial Sequence
  Cyclic GFR-binding peptide
  MOD_RES (6)..(7): Xaa is C or S
TVPKPXXAPTQLEPISVLYLDDS

SEQ ID NO: 9819 - protein, 14 aa, Artificial Sequence
  Cyclic GFR-binding peptide
  MOD_RES (1)..(1): Xaa is C or S
XAPTKLEPISVLYL

SEQ ID NO: 9820 - protein, 18 aa, Artificial Sequence
  Cyclic GFR-binding peptide
  MOD_RES (4)..(5): Xaa is C or S
SKAXXVPTKLSPISILYK

SEQ ID NO: 9821 - protein, 18 aa, Artificial Sequence
  Cyclic GFR-binding peptide
  MOD_RES (4)..(5): Xaa is C or S
SKAXXVPTKLSPISILYI

SEQ ID NO: 9822 - protein, 15 aa, Artificial Sequence
  Cyclic GFR-binding peptide
SPISILYIVGRKPKV

SEQ ID NO: 9823 - protein, 27 aa, Artificial Sequence
  Cyclic GFR-binding peptide
  MOD_RES (6)..(7): Xaa is C or S
ASASPXXVPQDLSPISILYIVGRTPKV

SEQ ID NO: 9824 - protein, 14 aa, Artificial Sequence
  Cyclic GFR-binding peptide
  MOD_RES (1)..(1): Xaa is C or S
XVPARLSPISILYK

SEQ ID NO: 9825 - protein, 20 aa, Artificial Sequence
  Cyclic GFR-binding peptide
  MOD_RES (6)..(7): Xaa is C or S
KIPKAXXVPTELEPISMLYL

SEQ ID NO: 9826 - protein, 16 aa, Artificial Sequence
  Cyclic GFR-binding peptide
  MOD_RES (2)..(3): Xaa is C or S
AXXVPTKLEPISVLYL

SEQ ID NO: 9827 - protein, 24 aa, Artificial Sequence
  Cyclic GFR-binding peptide
  MOD_RES (6)..(7): Xaa is C or S
YVPKPXXAPTKLEPISVLYLDDSS

SEQ ID NO: 9828 - protein, 26 aa, Artificial Sequence
  Cyclic GFR-binding peptide
  MOD_RES (6)..(7): Xaa is C or S
KASKAXXVPTKLSPISILYIDKGVVT

SEQ ID NO: 9829 - protein, 26 aa, Artificial Sequence
  Cyclic GFR-binding peptide
  MOD_RES (6)..(7): Xaa is C or S
SIPKAXXVPTELEPISMLYLDEYDKV

SEQ ID NO: 9830 - protein, 25 aa, Artificial Sequence
  Cyclic GFR-binding peptide
  MOD_RES (6)..(7): Xaa is C or S
ASASPXXVSQDLEPISILYLIGKTP

SEQ ID NO: 9831 - protein, 18 aa, Artificial Sequence
  Cyclic GFR-binding peptide
  MOD_RES (4)..(5): Xaa is C or S
PKPXXAPTQLEPISVLYL

SEQ ID NO: 9832 - protein, 17 aa, Artificial Sequence
  Cyclic GFR-binding peptide
  MOD_RES (3)..(4): Xaa is C or S
KAXXVPTKLNAISILYF

SEQ ID NO: 9833 - protein, 20 aa, Artificial Sequence
  Cyclic GFR-binding peptide
  MOD_RES (6)..(7): Xaa is C or S
AAPASXXVPARLSPISILYK

SEQ ID NO: 9834 - protein, 16 aa, Artificial Sequence
  Cyclic GFR-binding peptide
LNAISILYFDAANNVV

SEQ ID NO: 9835 - protein, 16 aa, Artificial Sequence
  Cyclic GFR-binding peptide
  MOD_RES (2)..(3): Xaa is C or S
SXXVPARLEPISILYL

SEQ ID NO: 9836 - protein, 19 aa, Artificial Sequence
  Cyclic GFR-binding peptide
  MOD_RES (6)..(6): Xaa is C or S
VTKPTXAPTKLEPISVLYL

SEQ ID NO: 9837 - protein, 26 aa, Artificial Sequence
  Cyclic GFR-binding peptide
  MOD_RES (6)..(7): Xaa is C or S
ASAAPXXVPQALEPISILYLVGRKPK

SEQ ID NO: 9838 - protein, 15 aa, Artificial Sequence
  Cyclic GFR-binding peptide
SPISVLYIDDSSNVI

SEQ ID NO: 9839 - protein, 17 aa, Artificial Sequence
  Cyclic GFR-binding peptide
  MOD_RES (3)..(4): Xaa is C or S
SPXXVSQDLSPISILYI

SEQ ID NO: 9840 - protein, 21 aa, Artificial Sequence
  Cyclic GFR-binding peptide
  MOD_RES (6)..(7): Xaa is C or S
ASASPXXVSQDLEPISILYLI

SEQ ID NO: 9841 - protein, 21 aa, Artificial Sequence
  Cyclic GFR-binding peptide
  MOD_RES (6)..(7): Xaa is C or S
ASASPXXVPQDLEPISILYLV

SEQ ID NO: 9842 - protein, 21 aa, Artificial Sequence
  Cyclic GFR-binding peptide
  MOD_RES (6)..(7): Xaa is C or S
KVGKAXXVPTKLEPISVLYLD

SEQ ID NO: 9843 - protein, 16 aa, Artificial Sequence
  Cyclic GFR-binding peptide
LSPISILYKDAANNVV

SEQ ID NO: 9844 - protein, 20 aa, Artificial Sequence
  Cyclic GFR-binding peptide
  MOD_RES (6)..(7): Xaa is C or S
AAPASXXVPARLNAISILYF

SEQ ID NO: 9845 - protein, 26 aa, Artificial Sequence
  Cyclic GFR-binding peptide
  MOD_RES (6)..(7): Xaa is C or S
ASASPXXVSQDLSPISILYIIGKTPK

SEQ ID NO: 9846 - protein, 18 aa, Artificial Sequence
  Cyclic GFR-binding peptide
  MOD_RES (4)..(5): Xaa is C or S
ASPXXVSQDLEPISILYL

SEQ ID NO: 9847 - protein, 19 aa, Artificial Sequence
  Cyclic GFR-binding peptide
  MOD_RES (5)..(6): Xaa is C or S
IPKAXXVPTELSPISMLYI

SEQ ID NO: 9848 - protein, 19 aa, Artificial Sequence
  Cyclic GFR-binding peptide
PTKLEPISVLYLDSSNNVI

SEQ ID NO: 9849 - protein, 27 aa, Artificial Sequence
  Cyclic GFR-binding peptide
  MOD_RES (6)..(7): Xaa is C or S
ASASPXXVSQDLEPISILYLIGKTPKI

SEQ ID NO: 9850 - protein, 17 aa, Artificial Sequence
  Cyclic GFR-binding peptide
  MOD_RES (3)..(4): Xaa is C or S
ASXXVPARLSPISILYK

SEQ ID NO: 9851 - protein, 17 aa, Artificial Sequence
  Cyclic GFR-binding peptide
ELSPISMLYIDENEKVV

SEQ ID NO: 9852 - protein, 16 aa, Artificial Sequence
  Cyclic GFR-binding peptide
  MOD_RES (2)..(3): Xaa is C or S
AXXVPTELSPISMLYI

SEQ ID NO: 9853 - protein, 23 aa, Artificial Sequence
  Cyclic GFR-binding peptide
  MOD_RES (6)..(7): Xaa is C or S
YVPKPXXAPTKLSPISVLYIDDS

SEQ ID NO: 9854 - protein, 15 aa, Artificial Sequence
  Cyclic GFR-binding peptide
SPISILYKDKGVVTY

SEQ ID NO: 9855 - protein, 19 aa, Artificial Sequence
  Cyclic GFR-binding peptide
SQDLEPISILYLIGKTPKI

SEQ ID NO: 9856 - protein, 18 aa, Artificial Sequence
  Cyclic GFR-binding peptide
TELSPISMLYIDEYDKVV

SEQ ID NO: 9857 - protein, 15 aa, Artificial Sequence
  Cyclic GFR-binding peptide
EPISILYLVGRKPKV

SEQ ID NO: 9858 - protein, 23 aa, Artificial Sequence
  Cyclic GFR-binding peptide
  MOD_RES (6)..(7): Xaa is C or S
KASKAXXVPTKLSPISILYIDKG

SEQ ID NO: 9859 - protein, 14 aa, Artificial Sequence
  Cyclic GFR-binding peptide
  MOD_RES (1)..(1): Xaa is C or S
XVSQDLSPISILYI

SEQ ID NO: 9860 - protein, 13 aa, Artificial Sequence
  Cyclic GFR-binding peptide
VPTELSPISMLYI

SEQ ID NO: 9861 - protein, 27 aa, Artificial Sequence
  Cyclic GFR-binding peptide
  MOD_RES (6)..(7): Xaa is C or S
SIPKAXXVPTELSPISMLYIDEYDKVV

SEQ ID NO: 9862 - protein, 26 aa, Artificial Sequence
  Cyclic GFR-binding peptide
  MOD_RES (6)..(7): Xaa is C or S
TVPKPXXAPTQLEPISVLYLDDSSNV

SEQ ID NO: 9863 - protein, 21 aa, Artificial Sequence
  Cyclic GFR-binding peptide
  MOD_RES (7)..(7): Xaa is C or S
HVTKPTXAPTKLEPISVLYLD

SEQ ID NO: 9864 - protein, 13 aa, Artificial Sequence
  Cyclic GFR-binding peptide
VPTKLSPISVLYI

SEQ ID NO: 9865 - protein, 18 aa, Artificial Sequence
  Cyclic GFR-binding peptide
TKLSPISVLYIDSSNNVI

SEQ ID NO: 9866 - protein, 17 aa, Artificial Sequence
  Cyclic GFR-binding peptide
KLNAISILYFDKGVVTY

SEQ ID NO: 9867 - protein, 19 aa, Artificial Sequence
  Cyclic GFR-binding peptide
  MOD_RES (5)..(6): Xaa is C or S
VPKAXXAPTKLSPISVLYI

SEQ ID NO: 9868 - protein, 16 aa, Artificial Sequence
  Cyclic GFR-binding peptide
  MOD_RES (2)..(3): Xaa is C or S
AXXVPTKLSPISILYI

SEQ ID NO: 9869 - protein, 18 aa, Artificial Sequence
  Cyclic GFR-binding peptide
TELEPISMLYLDENEKVV

SEQ ID NO: 9870 - protein, 16 aa, Artificial Sequence
  Cyclic GFR-binding peptide
  MOD_RES (2)..(3): Xaa is C or S
AXXVPTKLSPISILYK

SEQ ID NO: 9871 - protein, 18 aa, Artificial Sequence
  Cyclic GFR-binding peptide
TKLSPISILYIDKGVVTY

SEQ ID NO: 9872 - protein, 23 aa, Artificial Sequence
  Cyclic GFR-binding peptide
  MOD_RES (6)..(7): Xaa is C or S
AVPKAXXAPTKLEPISVLYLDSS

SEQ ID NO: 9873 - protein, 22 aa, Artificial Sequence
  Cyclic GFR-binding peptide
  MOD_RES (6)..(7): Xaa is C or S
AAPASXXVPARLNAISILYFDA

SEQ ID NO: 9874 - protein, 13 aa, Artificial Sequence
  Cyclic GFR-binding peptide
VPQALEPISILYL

SEQ ID NO: 9875 - protein, 15 aa, Artificial Sequence
  Cyclic GFR-binding peptide
SPISMLYIDENEKVV

SEQ ID NO: 9876 - protein, 15 aa, Artificial Sequence
  Cyclic GFR-binding peptide
  MOD_RES (1)..(2): Xaa is C or S
XXVPARLEPISILYL

SEQ ID NO: 9877 - protein, 22 aa, Artificial Sequence
  Cyclic GFR-binding peptide
  MOD_RES (6)..(7): Xaa is C or S
KIPKAXXVPTELSPISMLYIDE

SEQ ID NO: 9878 - protein, 23 aa, Artificial Sequence
  Cyclic GFR-binding peptide
  MOD_RES (6)..(7): Xaa is C or S
KVGKAXXVPTKLEPISVLYLDDM

SEQ ID NO: 9879 - protein, 26 aa, Artificial Sequence
  Cyclic GFR-binding peptide
  MOD_RES (7)..(7): Xaa is C or S
HVTKPTXAPTKLEPISVLYLDDSSNV

SEQ ID NO: 9880 - protein, 18 aa, Artificial Sequence
  Cyclic GFR-binding peptide
  MOD_RES (4)..(5): Xaa is C or S
PKAXXAPTKLEPISVLYL

SEQ ID NO: 9881 - protein, 19 aa, Artificial Sequence
  Cyclic GFR-binding peptide
  MOD_RES (5)..(6): Xaa is C or S
ASKAXXVPTKLSPISILYK

SEQ ID NO: 9882 - protein, 26 aa, Artificial Sequence
  Cyclic GFR-binding peptide
  MOD_RES (6)..(7): Xaa is C or S
KVGKAXXVPTKLEPISVLYLDDMGVP

SEQ ID NO: 9883 - protein, 19 aa, Artificial Sequence
  Cyclic GFR-binding peptide
  MOD_RES (5)..(6): Xaa is C or S
ASKAXXVPTKLSPISILYI

SEQ ID NO: 9884 - protein, 27 aa, Artificial Sequence
  Cyclic GFR-binding peptide
  MOD_RES (6)..(7): Xaa is C or S
KASKAXXVPTKLSPISILYIDKGVVTY

SEQ ID NO: 9885 - protein, 16 aa, Artificial Sequence
  Cyclic GFR-binding peptide
  MOD_RES (2)..(3): Xaa is C or S
AXXAPTKLSPISVLYI

SEQ ID NO: 9886 - protein, 25 aa, Artificial Sequence
  Cyclic GFR-binding peptide
  MOD_RES (6)..(7): Xaa is C or S
AAPASXXVPARLSPISILYKDAANN

SEQ ID NO: 9887 - protein, 23 aa, Artificial Sequence
  Cyclic GFR-binding peptide
  MOD_RES (6)..(7): Xaa is C or S
ASAAPXXVPQALEPISILYLVGR

SEQ ID NO: 9888 - protein, 17 aa, Artificial Sequence
  Cyclic GFR-binding peptide
ALSPISILYIVGRKPKV

SEQ ID NO: 9889 - protein, 18 aa, Artificial Sequence
  Cyclic GFR-binding peptide
QDLEPISILYLVGRTPKV

SEQ ID NO: 9890 - protein, 27 aa, Artificial Sequence
  Cyclic GFR-binding peptide
  MOD_RES (6)..(7): Xaa is C or S
AVPKAXXAPTKLEPISVLYLDSSNNVI

SEQ ID NO: 9891 - protein, 16 aa, Artificial Sequence
  Cyclic GFR-binding peptide
  MOD_RES (2)..(3): Xaa is C or S
PXXVPQDLSPISILYI

SEQ ID NO: 9892 - protein, 16 aa, Artificial Sequence
  Cyclic GFR-binding peptide
LSPISVLYIDDMGVPT

SEQ ID NO: 9893 - protein, 15 aa, Artificial Sequence
  Cyclic GFR-binding peptide
  MOD_RES (1)..(2): Xaa is C or S
XXVSQDLSPISILYI

SEQ ID NO: 9894 - protein, 18 aa, Artificial Sequence
  Cyclic GFR-binding peptide
  MOD_RES (4)..(5): Xaa is C or S
PASXXVPARLSPISILYK

SEQ ID NO: 9895 - protein, 15 aa, Artificial Sequence
  Cyclic GFR-binding peptide
EPISILYLIGKTPKI

SEQ ID NO: 9896 - protein, 25 aa, Artificial Sequence
  Cyclic GFR-binding peptide
  MOD_RES (6)..(7): Xaa is C or S
TVPKPXXAPTQLSPISVLYIDDSSN

SEQ ID NO: 9897 - protein, 17 aa, Artificial Sequence
  Cyclic GFR-binding peptide
  MOD_RES (4)..(4): Xaa is C or S
KPTXAPTKLSPISVLYI

SEQ ID NO: 9898 - protein, 26 aa, Artificial Sequence
  Cyclic GFR-binding peptide
  MOD_RES (7)..(7): Xaa is C or S
HVTKPTXAPTKLSPISVLYIDDSSNV

SEQ ID NO: 9899 - protein, 27 aa, Artificial Sequence
  Cyclic GFR-binding peptide
  MOD_RES (6)..(7): Xaa is C or S
ASAAPXXVPQALSPISILYIVGRKPKV

SEQ ID NO: 9900 - protein, 25 aa, Artificial Sequence
  Cyclic GFR-binding peptide
  MOD_RES (6)..(7): Xaa is C or S
KASKAXXVPTKLSPISILYIDKGVV

SEQ ID NO: 9901 - protein, 19 aa, Artificial Sequence
  Cyclic GFR-binding peptide
PTKLSPISVLYIDDMGVPT

SEQ ID NO: 9902 - protein, 20 aa, Artificial Sequence
  Cyclic GFR-binding peptide
  MOD_RES (6)..(7): Xaa is C or S
AVPKAXXAPTKLEPISVLYL

SEQ ID NO: 9903 - protein, 15 aa, Artificial Sequence
  Cyclic GFR-binding peptide
  MOD_RES (1)..(2): Xaa is C or S
XXVPQALSPISILYI

SEQ ID NO: 9904 - protein, 23 aa, Artificial Sequence
  Cyclic GFR-binding peptide
  MOD_RES (6)..(7): Xaa is C or S
ASASPXXVPQDLSPISILYIVGR

SEQ ID NO: 9905 - protein, 21 aa, Artificial Sequence
  Cyclic GFR-binding peptide
  MOD_RES (6)..(7): Xaa is C or S
SIPKAXXVPTELEPISMLYLD

SEQ ID NO: 9906 - protein, 26 aa, Artificial Sequence
  Cyclic GFR-binding peptide
  MOD_RES (6)..(7): Xaa is C or S
KIPKAXXVPTELEPISMLYLDENEKV

SEQ ID NO: 9907 - protein, 18 aa, Artificial Sequence
  Cyclic GFR-binding peptide
TKLEPISVLYLDDSSNVI

SEQ ID NO: 9908 - protein, 14 aa, Artificial Sequence
  Cyclic GFR-binding peptide
  MOD_RES (1)..(1): Xaa is C or S
XVPARLEPISILYL

SEQ ID NO: 9909 - protein, 18 aa, Artificial Sequence
  Cyclic GFR-binding peptide
  MOD_RES (4)..(5): Xaa is C or S
AAPXXVPQALSPISILYI

SEQ ID NO: 9910 - protein, 18 aa, Artificial Sequence
  Cyclic GFR-binding peptide
TQLEPISVLYLDDSSNVI

SEQ ID NO: 9911 - protein, 26 aa, Artificial Sequence
  Cyclic GFR-binding peptide
  MOD_RES (6)..(7): Xaa is C or S
KASKAXXVPTKLNAISILYFDKGVVT

SEQ ID NO: 9912 - protein, 23 aa, Artificial Sequence
  Cyclic GFR-binding peptide
  MOD_RES (6)..(7): Xaa is C or S
AAPASXXVPARLNAISILYFDAA

SEQ ID NO: 9913 - protein, 18 aa, Artificial Sequence
  Cyclic GFR-binding peptide
  MOD_RES (4)..(5): Xaa is C or S
PKPXXAPTQLSPISVLYI

SEQ ID NO: 9914 - protein, 13 aa, Artificial Sequence
  Cyclic GFR-binding peptide
APTQLSPISVLYI

SEQ ID NO: 9915 - protein, 21 aa, Artificial Sequence
  Cyclic GFR-binding peptide
  MOD_RES (6)..(7): Xaa is C or S
TVPKPXXAPTQLEPISVLYLD

SEQ ID NO: 9916 - protein, 13 aa, Artificial Sequence
  Cyclic GFR-binding peptide
VPTKLSPISILYI

SEQ ID NO: 9917 - protein, 13 aa, Artificial Sequence
  Cyclic GFR-binding peptide
VPTKLSPISILYK

SEQ ID NO: 9918 - protein, 27 aa, Artificial Sequence
  Cyclic GFR-binding peptide
  MOD_RES (6)..(7): Xaa is C or S
KASKAXXVPTKLNAISILYFDKGVVTY

SEQ ID NO: 9919 - protein, 24 aa, Artificial Sequence
  Cyclic GFR-binding peptide
  MOD_RES (6)..(7): Xaa is C or S
KASKAXXVPTKLNAISILYFDKGV

SEQ ID NO: 9920 - protein, 23 aa, Artificial Sequence
  Cyclic GFR-binding peptide
  MOD_RES (6)..(7): Xaa is C or S
SIPKAXXVPTELSPISMLYIDEY

SEQ ID NO: 9921 - protein, 14 aa, Artificial Sequence
  Cyclic GFR-binding peptide
  MOD_RES (1)..(1): Xaa is C or S
XVPQDLSPISILYI

SEQ ID NO: 9922 - protein, 13 aa, Artificial Sequence
  Cyclic GFR-binding peptide
VSQDLEPISILYL

SEQ ID NO: 9923 - protein, 27 aa, Artificial Sequence
  Cyclic GFR-binding peptide
  MOD_RES (6)..(7): Xaa is C or S
TVPKPXXAPTQLSPISVLYIDDSSNVI

SEQ ID NO: 9924 - protein, 18 aa, Artificial Sequence
  Cyclic GFR-binding peptide
  MOD_RES (5)..(5): Xaa is C or S
TKPTXAPTKLSPISVLYI

SEQ ID NO: 9925 - protein, 17 aa, Artificial Sequence
  Cyclic GFR-binding peptide
ELSPISMLYIDEYDKVV

SEQ ID NO: 9926 - protein, 19 aa, Artificial Sequence
  Cyclic GFR-binding peptide
PQALSPISILYIVGRKPKV

SEQ ID NO: 9927 - protein, 15 aa, Artificial Sequence
  Cyclic GFR-binding peptide
  MOD_RES (1)..(2): Xaa is C or S
XXVPQDLSPISILYI

SEQ ID NO: 9928 - protein, 20 aa, Artificial Sequence
  Cyclic GFR-binding peptide
  MOD_RES (6)..(7): Xaa is C or S
ASAAPXXVPQALSPISILYI

SEQ ID NO: 9929 - protein, 16 aa, Artificial Sequence
  Cyclic GFR-binding peptide
LEPISMLYLDEYDKVV

SEQ ID NO: 9930 - protein, 16 aa, Artificial Sequence
  Cyclic GFR-binding peptide
  MOD_RES (2)..(3): Xaa is C or S
AXXVPTKLSPISVLYI

SEQ ID NO: 9931 - protein, 18 aa, Artificial Sequence
  Cyclic GFR-binding peptide
QDLEPISILYLIGKTPKI

SEQ ID NO: 9932 - protein, 19 aa, Artificial Sequence
  Cyclic GFR-binding peptide
  MOD_RES (5)..(6): Xaa is C or S
SASPXXVSQDLEPISILYL

SEQ ID NO: 9933 - protein, 17 aa, Artificial Sequence
  Cyclic GFR-binding peptide
  MOD_RES (3)..(4): Xaa is C or S
KPXXAPTKLSPISVLYI

SEQ ID NO: 9934 - protein, 25 aa, Artificial Sequence
  Cyclic GFR-binding peptide
  MOD_RES (6)..(7): Xaa is C or S
TVPKPXXAPTQLEPISVLYLDDSSN

SEQ ID NO: 9935 - protein, 21 aa, Artificial Sequence
  Cyclic GFR-binding peptide
  MOD_RES (6)..(7): Xaa is C or S
YVPKPXXAPTKLSPISVLYID

SEQ ID NO: 9936 - protein, 17 aa, Artificial Sequence
  Cyclic GFR-binding peptide
  MOD_RES (3)..(4): Xaa is C or S
KPXXAPTQLSPISVLYI

SEQ ID NO: 9937 - protein, 23 aa, Artificial Sequence
  Cyclic GFR-binding peptide
  MOD_RES (6)..(7): Xaa is C or S
TVPKPXXAPTQLSPISVLYIDDS

SEQ ID NO: 9938 - protein, 14 aa, Artificial Sequence
  Cyclic GFR-binding peptide
  MOD_RES (1)..(1): Xaa is C or S
XVPARLNAISILYF

SEQ ID NO: 9939 - protein, 25 aa, Artificial Sequence
  Cyclic GFR-binding peptide
  MOD_RES (6)..(7): Xaa is C or S
AAPASXXVPARLNAISILYFDAANN

SEQ ID NO: 9940 - protein, 14 aa, Artificial Sequence
  Cyclic GFR-binding peptide
  MOD_RES (1)..(1): Xaa is C or S
XVPQALSPISILYI

SEQ ID NO: 9941 - protein, 27 aa, Artificial Sequence
  Cyclic GFR-binding peptide
  MOD_RES (6)..(7): Xaa is C or S
KASKAXXVPTKLSPISILYKDKGVVTY

SEQ ID NO: 9942 - protein, 27 aa, Artificial Sequence
  Cyclic GFR-binding peptide
  MOD_RES (6)..(7): Xaa is C or S
KVGKAXXVPTKLSPISVLYIDDMGVPT

SEQ ID NO: 9943 - protein, 18 aa, Artificial Sequence
  Cyclic GFR-binding peptide
  MOD_RES (4)..(5): Xaa is C or S
PKPXXAPTKLSPISVLYI

SEQ ID NO: 9944 - protein, 19 aa, Artificial Sequence
  Cyclic GFR-binding peptide
PTELEPISMLYLDEYDKVV

SEQ ID NO: 9945 - protein, 25 aa, Artificial Sequence
  Cyclic GFR-binding peptide
  MOD_RES (6)..(7): Xaa is C or S
SIPKAXXVPTELEPISMLYLDEYDK

SEQ ID NO: 9946 - protein, 16 aa, Artificial Sequence
  Cyclic GFR-binding peptide
LSPISILYIIGKTPKI

SEQ ID NO: 9947 - protein, 13 aa, Artificial Sequence
  Cyclic GFR-binding peptide
APTKLSPISVLYI

SEQ ID NO: 9948 - protein, 24 aa, Artificial Sequence
  Cyclic GFR-binding peptide
  MOD_RES (6)..(7): Xaa is C or S
ASASPXXVSQDLSPISILYIIGKT

SEQ ID NO: 9949 - protein, 17 aa, Artificial Sequence
  Cyclic GFR-binding peptide
KLSPISILYKDKGVVTY

SEQ ID NO: 9950 - protein, 15 aa, Artificial Sequence
  Cyclic GFR-binding peptide
EPISVLYLDDMGVPT

SEQ ID NO: 9951 - protein, 20 aa, Artificial Sequence
  Cyclic GFR-binding peptide
  MOD_RES (6)..(7): Xaa is C or S
YVPKPXXAPTKLEPISVLYL

SEQ ID NO: 9952 - protein, 26 aa, Artificial Sequence
  Cyclic GFR-binding peptide
  MOD_RES (6)..(7): Xaa is C or S
ASASPXXVPQDLSPISILYIVGRTPK

SEQ ID NO: 9953 - protein, 25 aa, Artificial Sequence
  Cyclic GFR-binding peptide
  MOD_RES (19)..(19): Xaa is C or S
NSSDDFYLVNIPSLKTPAXTPKTVH

SEQ ID NO: 9954 - protein, 25 aa, Artificial Sequence
  Cyclic GFR-binding peptide
  MOD_RES (19)..(20): Xaa is C or S
NNASDFYLINIPSLRTPVXXTPPTS

SEQ ID NO: 9955 - protein, 17 aa, Artificial Sequence
  Cyclic GFR-binding peptide
IVNSSDDFYLVNIPSLK

SEQ ID NO: 9956 - protein, 27 aa, Artificial Sequence
  Cyclic GFR-binding peptide
  MOD_RES (21)..(22): Xaa is C or S
TPVGMDDFYLVNIPSLKTPVXXAKGVK

SEQ ID NO: 9957 - protein, 16 aa, Artificial Sequence
  Cyclic GFR-binding peptide
VVKENEDFYLMNIPSL

SEQ ID NO: 9958 - protein, 13 aa, Artificial Sequence
  Cyclic GFR-binding peptide
FYLINIPSLRTPV

SEQ ID NO: 9959 - protein, 17 aa, Artificial Sequence
  Cyclic GFR-binding peptide
LLVRGNDFYLMNIPSTK

SEQ ID NO: 9960 - protein, 25 aa, Artificial Sequence
  Cyclic GFR-binding peptide
  MOD_RES (19)..(20): Xaa is C or S
VVGKDFYLINIPSLKTPVXXAKSAK

SEQ ID NO: 9961 - protein, 17 aa, Artificial Sequence
  Cyclic GFR-binding peptide
  MOD_RES (14)..(15): Xaa is C or S
FYLVNIPSLKTPAXXAK

SEQ ID NO: 9962 - protein, 15 aa, Artificial Sequence
  Cyclic GFR-binding peptide
  MOD_RES (14)..(15): Xaa is C or S
FYLMNIPSLETPVXX

SEQ ID NO: 9963 - protein, 16 aa, Artificial Sequence
  Cyclic GFR-binding peptide
  MOD_RES (14)..(15): Xaa is C or S
FYLINIPSLRTPVXXT

SEQ ID NO: 9964 - protein, 21 aa, Artificial Sequence
  Cyclic GFR-binding peptide
  MOD_RES (15)..(16): Xaa is C or S
DFYLMNIPSLETPVXXAKPIS

SEQ ID NO: 9965 - protein, 27 aa, Artificial Sequence
  Cyclic GFR-binding peptide
  MOD_RES (21)..(22): Xaa is C or S
VVNNAADFYLINIPSLRAPVXXSAPAA

SEQ ID NO: 9966 - protein, 22 aa, Artificial Sequence
  Cyclic GFR-binding peptide
  MOD_RES (16)..(17): Xaa is C or S
ADFYLINIPSLRAPVXXSAPAA

SEQ ID NO: 9967 - protein, 24 aa, Artificial Sequence
  Cyclic GFR-binding peptide
  MOD_RES (18)..(19): Xaa is C or S
SSDDFYLVNIPSLKTPAXXPKPVH

SEQ ID NO: 9968 - protein, 19 aa, Artificial Sequence
  Cyclic GFR-binding peptide
VVKENEDFYLMNIPSLETP

SEQ ID NO: 9969 - protein, 27 aa, Artificial Sequence
  Cyclic GFR-binding peptide
  MOD_RES (21)..(22): Xaa is C or S
VVNNASDFYLINIPSLRTPVXXTPPTS

SEQ ID NO: 9970 - protein, 13 aa, Artificial Sequence
  Cyclic GFR-binding peptide
FYLINIPSLKTPV

SEQ ID NO: 9971 - protein, 19 aa, Artificial Sequence
  Cyclic GFR-binding peptide
  MOD_RES (14)..(14): Xaa is C or S
FYLVNIPSLKTPAXTPKTV

SEQ ID NO: 9972 - protein, 25 aa, Artificial Sequence
  Cyclic GFR-binding peptide
  MOD_RES (19)..(20): Xaa is C or S
NNSSDFYLVNIPSLKTPAXXAKPVA

SEQ ID NO: 9973 - protein, 13 aa, Artificial Sequence
  Cyclic GFR-binding peptide
FYLVNIPSLQTPA

SEQ ID NO: 9974 - protein, 20 aa, Artificial Sequence
  Cyclic GFR-binding peptide
  MOD_RES (14)..(15): Xaa is C or S
FYLVNIPSLQTPAXXPKPVT

SEQ ID NO: 9975 - protein, 23 aa, Artificial Sequence
  Cyclic GFR-binding peptide
  MOD_RES (17)..(18): Xaa is C or S
GKDFYLINIPSLKTPVXXAKSAK

SEQ ID NO: 9976 - protein, 20 aa, Artificial Sequence
  Cyclic GFR-binding peptide
  MOD_RES (14)..(15): Xaa is C or S
FYLVNIPSLKTPVXXAKGVK

SEQ ID NO: 9977 - protein, 16 aa, Artificial Sequence
  Cyclic GFR-binding peptide
TPVGMDDFYLVNIPSL

SEQ ID NO: 9978 - protein, 21 aa, Artificial Sequence
  Cyclic GFR-binding peptide
  MOD_RES (15)..(16): Xaa is C or S
DFYLMNIPSTKVPAXXTSPVR

SEQ ID NO: 9979 - protein, 14 aa, Artificial Sequence
  Cyclic GFR-binding peptide
  MOD_RES (14)..(14): Xaa is C or S
FYLVNIPSLKTPVX

SEQ ID NO: 9980 - protein, 22 aa, Artificial Sequence
  Cyclic GFR-binding peptide
  MOD_RES (16)..(16): Xaa is C or S
DDFYLVNIPSLKTPAXTPKTVH

SEQ ID NO: 9981 - protein, 23 aa, Artificial Sequence
  Cyclic GFR-binding peptide
  MOD_RES (17)..(18): Xaa is C or S
SDDFYLVNIPSLKTPAXXPKPVY

SEQ ID NO: 9982 - protein, 17 aa, Artificial Sequence
  Cyclic GFR-binding peptide
TPVGMDDFYLVNIPSLK

SEQ ID NO: 9983 - protein, 18 aa, Artificial Sequence
  Cyclic GFR-binding peptide
  MOD_RES (14)..(14): Xaa is C or S
FYLVNIPSLKTPAXTPKT

SEQ ID NO: 9984 - protein, 20 aa, Artificial Sequence
  Cyclic GFR-binding peptide
  MOD_RES (14)..(15): Xaa is C or S
FYLMNIPSLETPVXXAKPIK

SEQ ID NO: 9985 - protein, 15 aa, Artificial Sequence
  Cyclic GFR-binding peptide
  MOD_RES (14)..(15): Xaa is C or S
FYLINIPSLRAPVXX

SEQ ID NO: 9986 - protein, 25 aa, Artificial Sequence
  Cyclic GFR-binding peptide
  MOD_RES (19)..(20): Xaa is C or S
KENEDFYLMNIPSLETPVXXAKPIK

SEQ ID NO: 9987 - protein, 26 aa, Artificial Sequence
  Cyclic GFR-binding peptide
  MOD_RES (20)..(21): Xaa is C or S
PVGMDDFYLVNIPSLKTPVXXAKGVK

SEQ ID NO: 9988 - protein, 24 aa, Artificial Sequence
  Cyclic GFR-binding peptide
  MOD_RES (18)..(19): Xaa is C or S
SSDDFYLVNIPSLQTPAXXPKPVT

SEQ ID NO: 9989 - protein, 27 aa, Artificial Sequence
  Cyclic GFR-binding peptide
  MOD_RES (21)..(21): Xaa is C or S
IVNSSDDFYLVNIPSLKTPAXTPKTVH

SEQ ID NO: 9990 - protein, 17 aa, Artificial Sequence
  Cyclic GFR-binding peptide
  MOD_RES (14)..(15): Xaa is C or S
FYLVNIPSLQTPAXXPK

SEQ ID NO: 9991 - protein, 15 aa, Artificial Sequence
  Cyclic GFR-binding peptide
LLVRGNDFYLMNIPS

SEQ ID NO: 9992 - protein, 23 aa, Artificial Sequence
  Cyclic GFR-binding peptide
  MOD_RES (17)..(18): Xaa is C or S
SDDFYLVNIPSLKTPAXXPKPVH

SEQ ID NO: 9993 - protein, 27 aa, Artificial Sequence
  Cyclic GFR-binding peptide
  MOD_RES (21)..(22): Xaa is C or S
VVKENEDFYLMNIPSLETPVXXAKPIK

SEQ ID NO: 9994 - protein, 18 aa, Artificial Sequence
  Cyclic GFR-binding peptide
  MOD_RES (14)..(15): Xaa is C or S
FYLMNIPSTKVPAXXTSP

SEQ ID NO: 9995 - protein, 15 aa, Artificial Sequence
  Cyclic GFR-binding peptide
YTVVGKDFYLINIPS

SEQ ID NO: 9996 - protein, 18 aa, Artificial Sequence
  Cyclic GFR-binding peptide
  MOD_RES (14)..(15): Xaa is C or S
FYLINIPSLRTPVXXTPP

SEQ ID NO: 9997 - protein, 18 aa, Artificial Sequence
  Cyclic GFR-binding peptide
  MOD_RES (14)..(15): Xaa is C or S
FYLVNIPSLQTPAXXPKP

SEQ ID NO: 9998 - protein, 16 aa, Artificial Sequence
  Cyclic GFR-binding peptide
  MOD_RES (14)..(15): Xaa is C or S
FYLVNIPSLKTPAXXA

SEQ ID NO: 9999 - protein, 26 aa, Artificial Sequence
  Cyclic GFR-binding peptide
  MOD_RES (20)..(21): Xaa is C or S
VNSSDDFYLVNIPSLQTPAXXPKPVT

SEQ ID NO: 10000 - protein, 18 aa, Artificial Sequence
  Cyclic GFR-binding peptide
VVNNAADFYLINIPSLRA

SEQ ID NO: 10001 - protein, 22 aa, Artificial Sequence
  Cyclic GFR-binding peptide
  MOD_RES (16)..(17): Xaa is C or S
DDFYLVNIPSLKTPAXXPKPVY

SEQ ID NO: 10002 - protein, 24 aa, Artificial Sequence
  Cyclic GFR-binding peptide
  MOD_RES (18)..(19): Xaa is C or S
SSDDFYLVNIPSLKTPAXXPKPVY

SEQ ID NO: 10003 - protein, 13 aa, Artificial Sequence
  Cyclic GFR-binding peptide
FYLINIPSLRAPV

SEQ ID NO: 10004 - protein, 19 aa, Artificial Sequence
  Cyclic GFR-binding peptide
LLVRGNDFYLMNIPSTKVP

SEQ ID NO: 10005 - protein, 17 aa, Artificial Sequence
  Cyclic GFR-binding peptide
VVKENEDFYLMNIPSLE

SEQ ID NO: 10006 - protein, 20 aa, Artificial Sequence
  Cyclic GFR-binding peptide
  MOD_RES (14)..(15): Xaa is C or S
FYLVNIPSLKTPAXXPKPVH

SEQ ID NO: 10007 - protein, 15 aa, Artificial Sequence
  Cyclic GFR-binding peptide
  MOD_RES (14)..(15): Xaa is C or S
FYLINIPSLRTPVXX

SEQ ID NO: 10008 - protein, 22 aa, Artificial Sequence
  Cyclic GFR-binding peptide
  MOD_RES (16)..(17): Xaa is C or S
EDFYLMNIPSLETPVXXAKPIK

SEQ ID NO: 10009 - protein, 16 aa, Artificial Sequence
  Cyclic GFR-binding peptide
IVNNSSDFYLVNIPSL

SEQ ID NO: 10010 - protein, 15 aa, Artificial Sequence
  Cyclic GFR-binding peptide
IVNNSSDFYLVNIPS

SEQ ID NO: 10011 - protein, 16 aa, Artificial Sequence
  Cyclic GFR-binding peptide
  MOD_RES (14)..(14): Xaa is C or S
FYLVNIPSLKTPAXTP

SEQ ID NO: 10012 - protein, 26 aa, Artificial Sequence
  Cyclic GFR-binding peptide
  MOD_RES (20)..(21): Xaa is C or S
VNSSDDFYLVNIPSLKTPAXXPKPVY

SEQ ID NO: 10013 - protein, 21 aa, Artificial Sequence
  Cyclic GFR-binding peptide
  MOD_RES (15)..(16): Xaa is C or S
DFYLMNIPSLETPVXXAKPIK

SEQ ID NO: 10014 - protein, 23 aa, Artificial Sequence
  Cyclic GFR-binding peptide
  MOD_RES (17)..(18): Xaa is C or S
SDDFYLVNIPSLQTPAXXPKPVT

SEQ ID NO: 10015 - protein, 25 aa, Artificial Sequence
  Cyclic GFR-binding peptide
  MOD_RES (19)..(20): Xaa is C or S
NSSDDFYLVNIPSLKTPAXXPKPVY

SEQ ID NO: 10016 - protein, 17 aa, Artificial Sequence
  Cyclic GFR-binding peptide
  MOD_RES (14)..(15): Xaa is C or S
FYLMNIPSLETPVXXAK

SEQ ID NO: 10017 - protein, 23 aa, Artificial Sequence
  Cyclic GFR-binding peptide
  MOD_RES (17)..(18): Xaa is C or S
AADFYLINIPSLRAPVXXSAPAA

SEQ ID NO: 10018 - protein, 15 aa, Artificial Sequence
  Cyclic GFR-binding peptide
  MOD_RES (14)..(15): Xaa is C or S
FYLINIPSLKTPVXX

SEQ ID NO: 10019 - protein, 22 aa, Artificial Sequence
  Cyclic GFR-binding peptide
  MOD_RES (16)..(17): Xaa is C or S
DDFYLVNIPSLKTPVXXAKGVK

SEQ ID NO: 10020 - protein, 18 aa, Artificial Sequence
  Cyclic GFR-binding peptide
  MOD_RES (14)..(15): Xaa is C or S
FYLVNIPSLKTPVXXAKG

SEQ ID NO: 10021 - protein, 19 aa, Artificial Sequence
  Cyclic GFR-binding peptide
  MOD_RES (14)..(15): Xaa is C or S
FYLMNIPSTKVPAXXTSPV

SEQ ID NO: 10022 - protein, 15 aa, Artificial Sequence
  Cyclic GFR-binding peptide
  MOD_RES (14)..(15): Xaa is C or S
FYLVNIPSLQTPAXX

SEQ ID NO: 10023 - protein, 19 aa, Artificial Sequence
  Cyclic GFR-binding peptide
VVNNAADFYLINIPSLRAP

SEQ ID NO: 10024 - protein, 24 aa, Artificial Sequence
  Cyclic GFR-binding peptide
  MOD_RES (18)..(19): Xaa is C or S
VGKDFYLINIPSLKTPVXXAKSAK

SEQ ID NO: 10025 - protein, 18 aa, Artificial Sequence
  Cyclic GFR-binding peptide
IVNNSSDFYLVNIPSLKT

SEQ ID NO: 10026 - protein, 20 aa, Artificial Sequence
  Cyclic GFR-binding peptide
  MOD_RES (14)..(15): Xaa is C or S
FYLVNIPSLKTPAXXPKPVY

SEQ ID NO: 10027 - protein, 24 aa, Artificial Sequence
  Cyclic GFR-binding peptide
  MOD_RES (18)..(19): Xaa is C or S
NSSDFYLVNIPSLKTPAXXAKPVA

SEQ ID NO: 10028 - protein, 18 aa, Artificial Sequence
  Cyclic GFR-binding peptide
  MOD_RES (14)..(15): Xaa is C or S
FYLINIPSLRAPVXXSAP

SEQ ID NO: 10029 - protein, 26 aa, Artificial Sequence
  Cyclic GFR-binding peptide
  MOD_RES (20)..(21): Xaa is C or S
VNNASDFYLINIPSLRTPVXXTPPTS

SEQ ID NO: 10030 - protein, 22 aa, Artificial Sequence
  Cyclic GFR-binding peptide
  MOD_RES (16)..(17): Xaa is C or S
DDFYLVNIPSLQTPAXXPKPVT

SEQ ID NO: 10031 - protein, 14 aa, Artificial Sequence
  Cyclic GFR-binding peptide
  MOD_RES (14)..(14): Xaa is C or S
FYLMNIPSTKVPAX

SEQ ID NO: 10032 - protein, 26 aa, Artificial Sequence
  Cyclic GFR-binding peptide
  MOD_RES (20)..(21): Xaa is C or S
TVVGKDFYLINIPSLKTPVXXAKSAK

SEQ ID NO: 10033 - protein, 23 aa, Artificial Sequence
  Cyclic GFR-binding peptide
  MOD_RES (17)..(18): Xaa is C or S
GNDFYLMNIPSTKVPAXXTSPVR

SEQ ID NO: 10034 - protein, 26 aa, Artificial Sequence
  Cyclic GFR-binding peptide
  MOD_RES (20)..(21): Xaa is C or S
VNNAADFYLINIPSLRAPVXXSAPAA

SEQ ID NO: 10035 - protein, 21 aa, Artificial Sequence
  Cyclic GFR-binding peptide
  MOD_RES (15)..(15): Xaa is C or S
DFYLVNIPSLKTPAXTPKTVH

SEQ ID NO: 10036 - protein, 26 aa, Artificial Sequence
  Cyclic GFR-binding peptide
  MOD_RES (20)..(21): Xaa is C or S
LVRGNDFYLMNIPSTKVPAXXTSPVR

SEQ ID NO: 10037 - protein, 25 aa, Artificial Sequence
  Cyclic GFR-binding peptide
  MOD_RES (19)..(20): Xaa is C or S
NSSDDFYLVNIPSLQTPAXXPKPVT

SEQ ID NO: 10038 - protein, 18 aa, Artificial Sequence
  Cyclic GFR-binding peptide
LLVRGNDFYLMNIPSTKV

SEQ ID NO: 10039 - protein, 23 aa, Artificial Sequence
  Cyclic GFR-binding peptide
  MOD_RES (17)..(18): Xaa is C or S
ASDFYLINIPSLRTPVXXTPPTS

SEQ ID NO: 10040 - protein, 17 aa, Artificial Sequence
  Cyclic GFR-binding peptide
YTVVGKDFYLINIPSLK

SEQ ID NO: 10041 - protein, 25 aa, Artificial Sequence
  Cyclic GFR-binding peptide
  MOD_RES (19)..(20): Xaa is C or S
VRGNDFYLMNIPSTKVPAXXTSPVR

SEQ ID NO: 10042 - protein, 18 aa, Artificial Sequence
  Cyclic GFR-binding peptide
YTVVGKDFYLINIPSLKT

SEQ ID NO: 10043 - protein, 17 aa, Artificial Sequence
  Cyclic GFR-binding peptide
  MOD_RES (14)..(15): Xaa is C or S
FYLINIPSLRAPVXXSA

SEQ ID NO: 10044 - protein, 17 aa, Artificial Sequence
  Cyclic GFR-binding peptide
IVNNSSDFYLVNIPSLK

SEQ ID NO: 10045 - protein, 14 aa, Artificial Sequence
  Cyclic GFR-binding peptide
  MOD_RES (14)..(14): Xaa is C or S
FYLVNIPSLKTPAX

SEQ ID NO: 10046 - protein, 16 aa, Artificial Sequence
  Cyclic GFR-binding peptide
YTVVGKDFYLINIPSL

SEQ ID NO: 10047 - protein, 24 aa, Artificial Sequence
  Cyclic GFR-binding peptide
  MOD_RES (18)..(19): Xaa is C or S
NAADFYLINIPSLRAPVXXSAPAA

SEQ ID NO: 10048 - protein, 20 aa, Artificial Sequence
  Cyclic GFR-binding peptide
  MOD_RES (14)..(15): Xaa is C or S
FYLVNIPSLKTPAXXAKPVA

SEQ ID NO: 10049 - protein, 19 aa, Artificial Sequence
  Cyclic GFR-binding peptide
  MOD_RES (14)..(15): Xaa is C or S
FYLINIPSLRTPVXXTPPT

SEQ ID NO: 10050 - protein, 19 aa, Artificial Sequence
  Cyclic GFR-binding peptide
TPVGMDDFYLVNIPSLKTP

SEQ ID NO: 10051 - protein, 27 aa, Artificial Sequence
  Cyclic GFR-binding peptide
  MOD_RES (21)..(22): Xaa is C or S
IVNSSDDFYLVNIPSLKTPAXXPKPVY

SEQ ID NO: 10052 - protein, 19 aa, Artificial Sequence
  Cyclic GFR-binding peptide
  MOD_RES (14)..(15): Xaa is C or S
FYLVNIPSLKTPAXXPKPV

SEQ ID NO: 10053 - protein, 19 aa, Artificial Sequence
  Cyclic GFR-binding peptide
  MOD_RES (14)..(15): Xaa is C or S
FYLINIPSLKTPVXXAKSA

SEQ ID NO: 10054 - protein, 17 aa, Artificial Sequence
  Cyclic GFR-binding peptide
  MOD_RES (14)..(15): Xaa is C or S
FYLVNIPSLKTPVXXAK

SEQ ID NO: 10055 - protein, 20 aa, Artificial Sequence
  Cyclic GFR-binding peptide
  MOD_RES (14)..(15): Xaa is C or S
FYLMNIPSTKVPAXXTSPVR

SEQ ID NO: 10056 - protein, 22 aa, Artificial Sequence
  Cyclic GFR-binding peptide
  MOD_RES (16)..(17): Xaa is C or S
SDFYLINIPSLRTPVXXTPPTS

SEQ ID NO: 10057 - protein, 21 aa, Artificial Sequence
  Cyclic GFR-binding peptide
  MOD_RES (15)..(16): Xaa is C or S
DFYLVNIPSLQTPAXXPKPVT

SEQ ID NO: 10058 - protein, 16 aa, Artificial Sequence
  Cyclic GFR-binding peptide
  MOD_RES (14)..(15): Xaa is C or S
FYLMNIPSLETPVXXA

SEQ ID NO: 10059 - protein, 26 aa, Artificial Sequence
  Cyclic GFR-binding peptide
  MOD_RES (20)..(21): Xaa is C or S
VKDYEDFYLMNIPSLETPVXXAKPIS

SEQ ID NO: 10060 - protein, 25 aa, Artificial Sequence
  Cyclic GFR-binding peptide
  MOD_RES (19)..(20): Xaa is C or S
NSSDDFYLVNIPSLKTPAXXPKPVH

SEQ ID NO: 10061 - protein, 25 aa, Artificial Sequence
  Cyclic GFR-binding peptide
  MOD_RES (19)..(20): Xaa is C or S
KDYEDFYLMNIPSLETPVXXAKPIS

SEQ ID NO: 10062 - protein, 13 aa, Artificial Sequence
  Cyclic GFR-binding peptide
FYLVNIPSLKTPA

SEQ ID NO: 10063 - protein, 26 aa, Artificial Sequence
  Cyclic GFR-binding peptide
  MOD_RES (20)..(21): Xaa is C or S
VNSSDDFYLVNIPSLKTPAXXPKPVH

SEQ ID NO: 10064 - protein, 21 aa, Artificial Sequence
  Cyclic GFR-binding peptide
  MOD_RES (15)..(16): Xaa is C or S
DFYLINIPSLRTPVXXTPPTS

SEQ ID NO: 10065 - protein, 14 aa, Artificial Sequence
  Cyclic GFR-binding peptide
  MOD_RES (14)..(14): Xaa is C or S
FYLINIPSLKTPVX

SEQ ID NO: 10066 - protein, 27 aa, Artificial Sequence
  Cyclic GFR-binding peptide
  MOD_RES (21)..(22): Xaa is C or S
IVNNSSDFYLVNIPSLKTPAXXAKPVA

SEQ ID NO: 10067 - protein, 16 aa, Artificial Sequence
  Cyclic GFR-binding peptide
  MOD_RES (14)..(15): Xaa is C or S
FYLINIPSLRAPVXXS

SEQ ID NO: 10068 - protein, 15 aa, Artificial Sequence
  Cyclic GFR-binding peptide
  MOD_RES (14)..(15): Xaa is C or S
FYLMNIPSTKVPAXX

SEQ ID NO: 10069 - protein, 21 aa, Artificial Sequence
  Cyclic GFR-binding peptide
  MOD_RES (15)..(16): Xaa is C or S
DFYLINIPSLRAPVXXSAPAA

SEQ ID NO: 10070 - protein, 14 aa, Artificial Sequence
  Cyclic GFR-binding peptide
  MOD_RES (14)..(14): Xaa is C or S
FYLVNIPSLQTPAX

SEQ ID NO: 10071 - protein, 27 aa, Artificial Sequence
  Cyclic GFR-binding peptide
  MOD_RES (21)..(22): Xaa is C or S
YTVVGKDFYLINIPSLKTPVXXAKSAK

SEQ ID NO: 10072 - protein, 19 aa, Artificial Sequence
  Cyclic GFR-binding peptide
  MOD_RES (14)..(15): Xaa is C or S
FYLMNIPSLETPVXXAKPI

SEQ ID NO: 10073 - protein, 27 aa, Artificial Sequence
  Cyclic GFR-binding peptide
  MOD_RES (21)..(22): Xaa is C or S
VVKDYEDFYLMNIPSLETPVXXAKPIS

SEQ ID NO: 10074 - protein, 21 aa, Artificial Sequence
  Cyclic GFR-binding peptide
  MOD_RES (15)..(16): Xaa is C or S
DFYLVNIPSLKTPVXXAKGVK

SEQ ID NO: 10075 - protein, 23 aa, Artificial Sequence
  Cyclic GFR-binding peptide
  MOD_RES (17)..(17): Xaa is C or S
SDDFYLVNIPSLKTPAXTPKTVH

SEQ ID NO: 10076 - protein, 20 aa, Artificial Sequence
  Cyclic GFR-binding peptide
  MOD_RES (14)..(15): Xaa is C or S
FYLINIPSLRAPVXXSAPAA

SEQ ID NO: 10077 - protein, 13 aa, Artificial Sequence
  Cyclic GFR-binding peptide
FYLVNIPSLKTPV

SEQ ID NO: 10078 - protein, 18 aa, Artificial Sequence
  Cyclic GFR-binding peptide
VVKENEDFYLMNIPSLET

SEQ ID NO: 10079 - protein, 26 aa, Artificial Sequence
  Cyclic GFR-binding peptide
  MOD_RES (20)..(21): Xaa is C or S
VNNSSDFYLVNIPSLKTPAXXAKPVA

SEQ ID NO: 10080 - protein, 15 aa, Artificial Sequence
  Cyclic GFR-binding peptide
TPVGMDDFYLVNIPS

SEQ ID NO: 10081 - protein, 17 aa, Artificial Sequence
  Cyclic GFR-binding peptide
VVNNASDFYLINIPSLR

SEQ ID NO: 10082 - protein, 14 aa, Artificial Sequence
  Cyclic GFR-binding peptide
  MOD_RES (14)..(14): Xaa is C or S
FYLINIPSLRTPVX

SEQ ID NO: 10083 - protein, 17 aa, Artificial Sequence
  Cyclic GFR-binding peptide
  MOD_RES (14)..(14): Xaa is C or S
FYLVNIPSLKTPAXTPK

SEQ ID NO: 10084 - protein, 20 aa, Artificial Sequence
  Cyclic GFR-binding peptide
  MOD_RES (14)..(15): Xaa is C or S
FYLINIPSLKTPVXXAKSAK

SEQ ID NO: 10085 - protein, 20 aa, Artificial Sequence
  Cyclic GFR-binding peptide
  MOD_RES (14)..(15): Xaa is C or S
FYLMNIPSLETPVXXAKPIS

SEQ ID NO: 10086 - protein, 17 aa, Artificial Sequence
  Cyclic GFR-binding peptide
  MOD_RES (14)..(15): Xaa is C or S
FYLINIPSLRTPVXXTP

SEQ ID NO: 10087 - protein, 16 aa, Artificial Sequence
  Cyclic GFR-binding peptide
  MOD_RES (14)..(15): Xaa is C or S
FYLMNIPSTKVPAXXT

SEQ ID NO: 10088 - protein, 15 aa, Artificial Sequence
  Cyclic GFR-binding peptide
VVKDYEDFYLMNIPS

SEQ ID NO: 10089 - protein, 18 aa, Artificial Sequence
  Cyclic GFR-binding peptide
  MOD_RES (14)..(15): Xaa is C or S
FYLMNIPSLETPVXXAKP

SEQ ID NO: 10090 - protein, 16 aa, Artificial Sequence
  Cyclic GFR-binding peptide
VVNNAADFYLINIPSL

SEQ ID NO: 10091 - protein, 16 aa, Artificial Sequence
  Cyclic GFR-binding peptide
  MOD_RES (14)..(15): Xaa is C or S
FYLVNIPSLKTPAXXP

SEQ ID NO: 10092 - protein, 15 aa, Artificial Sequence
  Cyclic GFR-binding peptide
VVKENEDFYLMNIPS

SEQ ID NO: 10093 - protein, 19 aa, Artificial Sequence
  Cyclic GFR-binding peptide
  MOD_RES (14)..(15): Xaa is C or S
FYLVNIPSLKTPAXXAKPV

SEQ ID NO: 10094 - protein, 13 aa, Artificial Sequence
  Cyclic GFR-binding peptide
FYLMNIPSTKVPA

SEQ ID NO: 10095 - protein, 24 aa, Artificial Sequence
  Cyclic GFR-binding peptide
  MOD_RES (18)..(19): Xaa is C or S
RGNDFYLMNIPSTKVPAXXTSPVR

SEQ ID NO: 10096 - protein, 19 aa, Artificial Sequence
  Cyclic GFR-binding peptide
YTVVGKDFYLINIPSLKTP

SEQ ID NO: 10097 - protein, 24 aa, Artificial Sequence
  Cyclic GFR-binding peptide
  MOD_RES (18)..(19): Xaa is C or S
DYEDFYLMNIPSLETPVXXAKPIS

SEQ ID NO: 10098 - protein, 18 aa, Artificial Sequence
  Cyclic GFR-binding peptide
TPVGMDDFYLVNIPSLKT

SEQ ID NO: 10099 - protein, 16 aa, Artificial Sequence
  Cyclic GFR-binding peptide
LLVRGNDFYLMNIPST

SEQ ID NO: 10100 - protein, 19 aa, Artificial Sequence
  Cyclic GFR-binding peptide
IVNNSSDFYLVNIPSLKTP

SEQ ID NO: 10101 - protein, 23 aa, Artificial Sequence
  Cyclic GFR-binding peptide
  MOD_RES (17)..(18): Xaa is C or S
YEDFYLMNIPSLETPVXXAKPIS

SEQ ID NO: 10102 - protein, 19 aa, Artificial Sequence
  Cyclic GFR-binding peptide
IVNSSDDFYLVNIPSLKTP

SEQ ID NO: 10103 - protein, 14 aa, Artificial Sequence
  Cyclic GFR-binding peptide
  MOD_RES (14)..(14): Xaa is C or S
FYLMNIPSLETPVX

SEQ ID NO: 10104 - protein, 19 aa, Artificial Sequence
  Cyclic GFR-binding peptide
  MOD_RES (14)..(15): Xaa is C or S
FYLVNIPSLQTPAXXPKPV

SEQ ID NO: 10105 - protein, 16 aa, Artificial Sequence
  Cyclic GFR-binding peptide
VVNNASDFYLINIPSL

SEQ ID NO: 10106 - protein, 16 aa, Artificial Sequence
  Cyclic GFR-binding peptide
  MOD_RES (14)..(15): Xaa is C or S
FYLVNIPSLKTPVXXA

SEQ ID NO: 10107 - protein, 19 aa, Artificial Sequence
  Cyclic GFR-binding peptide
IVNSSDDFYLVNIPSLQTP

SEQ ID NO: 10108 - protein, 24 aa, Artificial Sequence
  Cyclic GFR-binding peptide
  MOD_RES (18)..(19): Xaa is C or S
ENEDFYLMNIPSLETPVXXAKPIK

SEQ ID NO: 10109 - protein, 18 aa, Artificial Sequence
  Cyclic GFR-binding peptide
  MOD_RES (14)..(15): Xaa is C or S
FYLVNIPSLKTPAXXPKP

SEQ ID NO: 10110 - protein, 25 aa, Artificial Sequence
  Cyclic GFR-binding peptide
  MOD_RES (19)..(20): Xaa is C or S
NNAADFYLINIPSLRAPVXXSAPAA

SEQ ID NO: 10111 - protein, 19 aa, Artificial Sequence
  Cyclic GFR-binding peptide
VVKDYEDFYLMNIPSLETP

SEQ ID NO: 10112 - protein, 19 aa, Artificial Sequence
  Cyclic GFR-binding peptide
VVNNASDFYLINIPSLRTP

SEQ ID NO: 10113 - protein, 23 aa, Artificial Sequence
  Cyclic GFR-binding peptide
  MOD_RES (17)..(18): Xaa is C or S
MDDFYLVNIPSLKTPVXXAKGVK

SEQ ID NO: 10114 - protein, 18 aa, Artificial Sequence
  Cyclic GFR-binding peptide
  MOD_RES (14)..(15): Xaa is C or S
FYLINIPSLKTPVXXAKS

SEQ ID NO: 10115 - protein, 13 aa, Artificial Sequence
  Cyclic GFR-binding peptide
FYLMNIPSLETPV

SEQ ID NO: 10116 - protein, 24 aa, Artificial Sequence
  Cyclic GFR-binding peptide
  MOD_RES (18)..(19): Xaa is C or S
NASDFYLINIPSLRTPVXXTPPTS

SEQ ID NO: 10117 - protein, 16 aa, Artificial Sequence
  Cyclic GFR-binding peptide
  MOD_RES (14)..(15): Xaa is C or S
FYLINIPSLKTPVXXA

SEQ ID NO: 10118 - protein, 22 aa, Artificial Sequence
  Cyclic GFR-binding peptide
  MOD_RES (16)..(17): Xaa is C or S
EDFYLMNIPSLETPVXXAKPIS

SEQ ID NO: 10119 - protein, 16 aa, Artificial Sequence
  Cyclic GFR-binding peptide
IVNSSDDFYLVNIPSL

SEQ ID NO: 10120 - protein, 21 aa, Artificial Sequence
  Cyclic GFR-binding peptide
  MOD_RES (15)..(16): Xaa is C or S
DFYLVNIPSLKTPAXXPKPVY

SEQ ID NO: 10121 - protein, 15 aa, Artificial Sequence
  Cyclic GFR-binding peptide
  MOD_RES (14)..(15): Xaa is C or S
FYLVNIPSLKTPVXX

SEQ ID NO: 10122 - protein, 23 aa, Artificial Sequence
  Cyclic GFR-binding peptide
  MOD_RES (17)..(18): Xaa is C or S
SSDFYLVNIPSLKTPAXXAKPVA

SEQ ID NO: 10123 - protein, 15 aa, Artificial Sequence
  Cyclic GFR-binding peptide
IVNSSDDFYLVNIPS

SEQ ID NO: 10124 - protein, 15 aa, Artificial Sequence
  Cyclic GFR-binding peptide
  MOD_RES (14)..(15): Xaa is C or S
FYLVNIPSLKTPAXX

SEQ ID NO: 10125 - protein, 26 aa, Artificial Sequence
  Cyclic GFR-binding peptide
  MOD_RES (20)..(20): Xaa is C or S
VNSSDDFYLVNIPSLKTPAXTPKTVH

SEQ ID NO: 10126 - protein, 17 aa, Artificial Sequence
  Cyclic GFR-binding peptide
VVNNAADFYLINIPSLR

SEQ ID NO: 10127 - protein, 21 aa, Artificial Sequence
  Cyclic GFR-binding peptide
  MOD_RES (15)..(16): Xaa is C or S
DFYLVNIPSLKTPAXXAKPVA

SEQ ID NO: 10128 - skipped

SEQ ID NO: 10129 - protein, 21 aa, Artificial Sequence
  Cyclic GFR-binding peptide
  MOD_RES (15)..(16): Xaa is C or S
DFYLVNIPSLKTPAXXPKPVH

SEQ ID NO: 10130 - protein, 18 aa, Artificial Sequence
  Cyclic GFR-binding peptide
VVNNASDFYLINIPSLRT

SEQ ID NO: 10131 - protein, 17 aa, Artificial Sequence
  Cyclic GFR-binding peptide
  MOD_RES (14)..(15): Xaa is C or S
FYLMNIPSTKVPAXXTS

SEQ ID NO: 10132 - protein, 15 aa, Artificial Sequence
  Cyclic GFR-binding peptide
  MOD_RES (14)..(14): Xaa is C or S
FYLVNIPSLKTPAXT

SEQ ID NO: 10133 - protein, 27 aa, Artificial Sequence
  Cyclic GFR-binding peptide
  MOD_RES (21)..(22): Xaa is C or S
IVNSSDDFYLVNIPSLKTPAXXPKPVH

SEQ ID NO: 10134 - protein, 26 aa, Artificial Sequence
  Cyclic GFR-binding peptide
  MOD_RES (20)..(21): Xaa is C or S
VKENEDFYLMNIPSLETPVXXAKPIK

SEQ ID NO: 10135 - protein, 23 aa, Artificial Sequence
  Cyclic GFR-binding peptide
  MOD_RES (17)..(18): Xaa is C or S
NEDFYLMNIPSLETPVXXAKPIK

SEQ ID NO: 10136 - protein, 16 aa, Artificial Sequence
  Cyclic GFR-binding peptide
  MOD_RES (14)..(15): Xaa is C or S
FYLVNIPSLQTPAXXP

SEQ ID NO: 10137 - protein, 24 aa, Artificial Sequence
  Cyclic GFR-binding peptide
  MOD_RES (18)..(19): Xaa is C or S
GMDDFYLVNIPSLKTPVXXAKGVK

SEQ ID NO: 10138 - protein, 22 aa, Artificial Sequence
  Cyclic GFR-binding peptide
  MOD_RES (16)..(17): Xaa is C or S
KDFYLINIPSLKTPVXXAKSAK

SEQ ID NO: 10139 - protein, 18 aa, Artificial Sequence
  Cyclic GFR-binding peptide
  MOD_RES (14)..(15): Xaa is C or S
FYLVNIPSLKTPAXXAKP

SEQ ID NO: 10140 - protein, 19 aa, Artificial Sequence
  Cyclic GFR-binding peptide
  MOD_RES (14)..(15): Xaa is C or S
FYLINIPSLRAPVXXSAPA

SEQ ID NO: 10141 - protein, 25 aa, Artificial Sequence
  Cyclic GFR-binding peptide
  MOD_RES (19)..(20): Xaa is C or S
VGMDDFYLVNIPSLKTPVXXAKGVK

SEQ ID NO: 10142 - protein, 24 aa, Artificial Sequence
  Cyclic GFR-binding peptide
  MOD_RES (18)..(18): Xaa is C or S
SSDDFYLVNIPSLKTPAXTPKTVH

SEQ ID NO: 10143 - protein, 17 aa, Artificial Sequence
  Cyclic GFR-binding peptide
  MOD_RES (14)..(15): Xaa is C or S
FYLINIPSLKTPVXXAK

SEQ ID NO: 10144 - protein, 16 aa, Artificial Sequence
  Cyclic GFR-binding peptide
VVKDYEDFYLMNIPSL

SEQ ID NO: 10145 - protein, 22 aa, Artificial Sequence
  Cyclic GFR-binding peptide
  MOD_RES (16)..(17): Xaa is C or S
DDFYLVNIPSLKTPAXXPKPVH

SEQ ID NO: 10146 - protein, 17 aa, Artificial Sequence
  Cyclic GFR-binding peptide
IVNSSDDFYLVNIPSLQ

SEQ ID NO: 10147 - protein, 17 aa, Artificial Sequence
  Cyclic GFR-binding peptide
  MOD_RES (14)..(15): Xaa is C or S
FYLVNIPSLKTPAXXPK

SEQ ID NO: 10148 - protein, 27 aa, Artificial Sequence
  Cyclic GFR-binding peptide
  MOD_RES (21)..(22): Xaa is C or S
IVNSSDDFYLVNIPSLQTPAXXPKPVT

SEQ ID NO: 10149 - protein, 20 aa, Artificial Sequence
  Cyclic GFR-binding peptide
  MOD_RES (14)..(15): Xaa is C or S
FYLINIPSLRTPVXXTPPTS

SEQ ID NO: 10150 - protein, 27 aa, Artificial Sequence
  Cyclic GFR-binding peptide
  MOD_RES (21)..(22): Xaa is C or S
LLVRGNDFYLMNIPSTKVPAXXTSPVR

SEQ ID NO: 10151 - protein, 17 aa, Artificial Sequence
  Cyclic GFR-binding peptide
VVKDYEDFYLMNIPSLE

SEQ ID NO: 10152 - protein, 21 aa, Artificial Sequence
  Cyclic GFR-binding peptide
  MOD_RES (15)..(16): Xaa is C or S
DFYLINIPSLKTPVXXAKSAK

SEQ ID NO: 10153 - protein, 19 aa, Artificial Sequence
  Cyclic GFR-binding peptide
  MOD_RES (14)..(15): Xaa is C or S
FYLVNIPSLKTPVXXAKGV

SEQ ID NO: 10154 - protein, 18 aa, Artificial Sequence
  Cyclic GFR-binding peptide
IVNSSDDFYLVNIPSLQT

SEQ ID NO: 10155 - protein, 15 aa, Artificial Sequence
  Cyclic GFR-binding peptide
VVNNAADFYLINIPS

SEQ ID NO: 10156 - protein, 18 aa, Artificial Sequence
  Cyclic GFR-binding peptide
IVNSSDDFYLVNIPSLKT

SEQ ID NO: 10157 - protein, 18 aa, Artificial Sequence
  Cyclic GFR-binding peptide
VVKDYEDFYLMNIPSLET

SEQ ID NO: 10158 - protein, 15 aa, Artificial Sequence
  Cyclic GFR-binding peptide
VVNNASDFYLINIPS

SEQ ID NO: 10159 - protein, 20 aa, Artificial Sequence
  Cyclic GFR-binding peptide
  MOD_RES (14)..(14): Xaa is C or S
FYLVNIPSLKTPAXTPKTVH

SEQ ID NO: 10160 - protein, 22 aa, Artificial Sequence
  Cyclic GFR-binding peptide
  MOD_RES (16)..(17): Xaa is C or S
NDFYLMNIPSTKVPAXXTSPVR

SEQ ID NO: 10161 - protein, 14 aa, Artificial Sequence
  Cyclic GFR-binding peptide
  MOD_RES (14)..(14): Xaa is C or S
FYLINIPSLRAPVX

SEQ ID NO: 10162 - protein, 22 aa, Artificial Sequence
  Cyclic GFR-binding peptide
  MOD_RES (16)..(17): Xaa is C or S
SDFYLVNIPSLKTPAXXAKPVA

SEQ ID NO: 10163 - protein, 25 aa, Artificial Sequence
  Cyclic GFR-binding peptide
  MOD_RES (7)..(7): Xaa is C or S
HVTKPTXAPTKLSPINVLYFDDSSN

SEQ ID NO: 10164 - protein, 25 aa, Artificial Sequence
  Cyclic GFR-binding peptide
  MOD_RES (6)..(7): Xaa is C or S
STPPTXXVPTRLSPINILYFDSANN

SEQ ID NO: 10165 - protein, 17 aa, Artificial Sequence
  Cyclic GFR-binding peptide
KLSPINVLYFDDSSNVI

SEQ ID NO: 10166 - protein, 27 aa, Artificial Sequence
  Cyclic GFR-binding peptide
  MOD_RES (6)..(7): Xaa is C or S
KVGKAXXVPTKLSPINVLYFDDMGVPT

SEQ ID NO: 10167 - protein, 16 aa, Artificial Sequence
  Cyclic GFR-binding peptide
LSPINMLYFDENEKVV

SEQ ID NO: 10168 - protein, 13 aa, Artificial Sequence
  Cyclic GFR-binding peptide
VPTRLSPINILYF

SEQ ID NO: 10169 - protein, 17 aa, Artificial Sequence
  Cyclic GFR-binding peptide
KTSPINMLYFDNGRVLL

SEQ ID NO: 10170 - protein, 25 aa, Artificial Sequence
  Cyclic GFR-binding peptide
  MOD_RES (6)..(7): Xaa is C or S
KASKAXXVPTKLSPINILYFDKGVV

SEQ ID NO: 10171 - protein, 17 aa, Artificial Sequence
  Cyclic GFR-binding peptide
  MOD_RES (3)..(4): Xaa is C or S
KAXXAPTKLSPINVLYF

SEQ ID NO: 10172 - protein, 15 aa, Artificial Sequence
  Cyclic GFR-binding peptide
  MOD_RES (1)..(2): Xaa is C or S
XXVPTELSPINMLYF

SEQ ID NO: 10173 - protein, 16 aa, Artificial Sequence
  Cyclic GFR-binding peptide
  MOD_RES (2)..(3): Xaa is C or S
TXXVPTRLSPINILYF

SEQ ID NO: 10174 - protein, 21 aa, Artificial Sequence
  Cyclic GFR-binding peptide
  MOD_RES (6)..(7): Xaa is C or S
SIPKAXXVPTELSPINMLYFD

SEQ ID NO: 10175 - protein, 27 aa, Artificial Sequence
  Cyclic GFR-binding peptide
  MOD_RES (6)..(7): Xaa is C or S
AAPASXXVPARLSPINILYFDAANNVV

SEQ ID NO: 10176 - protein, 22 aa, Artificial Sequence
  Cyclic GFR-binding peptide
  MOD_RES (6)..(7): Xaa is C or S
AAPASXXVPARLSPINILYFDA

SEQ ID NO: 10177 - protein, 24 aa, Artificial Sequence
  Cyclic GFR-binding peptide
  MOD_RES (6)..(7): Xaa is C or S
HVPKPXXAPTKLSPINVLYFDDSS

SEQ ID NO: 10178 - protein, 19 aa, Artificial Sequence
  Cyclic GFR-binding peptide
PTELSPINMLYFDENEKVV

SEQ ID NO: 10179 - protein, 27 aa, Artificial Sequence
  Cyclic GFR-binding peptide
  MOD_RES (6)..(7): Xaa is C or S
STPPTXXVPTRLSPINILYFDSANNVV

SEQ ID NO: 10180 - protein, 13 aa, Artificial Sequence
  Cyclic GFR-binding peptide
VPTKLSPINILYF

SEQ ID NO: 10181 - protein, 19 aa, Artificial Sequence
  Cyclic GFR-binding peptide
  MOD_RES (6)..(6): Xaa is C or S
VTKPTXAPTKLSPINVLYF

SEQ ID NO: 10182 - protein, 25 aa, Artificial Sequence
  Cyclic GFR-binding peptide
  MOD_RES (6)..(7): Xaa is C or S
AVPKAXXAPTKLSPINVLYFDSSNN

SEQ ID NO: 10183 - protein, 13 aa, Artificial Sequence
  Cyclic GFR-binding peptide
APTQLSPINVLYF

SEQ ID NO: 10184 - protein, 20 aa, Artificial Sequence
  Cyclic GFR-binding peptide
  MOD_RES (6)..(7): Xaa is C or S
TVPKPXXAPTQLSPINVLYF

SEQ ID NO: 10185 - protein, 23 aa, Artificial Sequence
  Cyclic GFR-binding peptide
  MOD_RES (6)..(7): Xaa is C or S
KASKAXXVPTKLSPINILYFDKG

SEQ ID NO: 10186 - protein, 20 aa, Artificial Sequence
  Cyclic GFR-binding peptide
  MOD_RES (6)..(7): Xaa is C or S
KVGKAXXVPTKLSPINVLYF

SEQ ID NO: 10187 - protein, 16 aa, Artificial Sequence
  Cyclic GFR-binding peptide
LSPINVLYFDDMGVPT

SEQ ID NO: 10188 - protein, 21 aa, Artificial Sequence
  Cyclic GFR-binding peptide
  MOD_RES (6)..(7): Xaa is C or S
RVPSTXXAPVKTSPINMLYFD

SEQ ID NO: 10189 - protein, 14 aa, Artificial Sequence
  Cyclic GFR-binding peptide
  MOD_RES (1)..(1): Xaa is C or S
XVPTKLSPINVLYF

SEQ ID NO: 10190 - protein, 22 aa, Artificial Sequence
  Cyclic GFR-binding peptide
  MOD_RES (7)..(7): Xaa is C or S
HVTKPTXAPTKLSPINVLYFDD

SEQ ID NO: 10191 - protein, 23 aa, Artificial Sequence
  Cyclic GFR-binding peptide
  MOD_RES (6)..(7): Xaa is C or S
YVPKPXXAPTKLSPINVLYFDDS

SEQ ID NO: 10192 - protein, 17 aa, Artificial Sequence
  Cyclic GFR-binding peptide
KLSPINVLYFDDMGVPT

SEQ ID NO: 10193 - protein, 18 aa, Artificial Sequence
  Cyclic GFR-binding peptide
  MOD_RES (5)..(5): Xaa is C or S
TKPTXAPTKLSPINVLYF

SEQ ID NO: 10194 - protein, 20 aa, Artificial Sequence
  Cyclic GFR-binding peptide
  MOD_RES (6)..(7): Xaa is C or S
KIPKAXXVPTELSPINMLYF

SEQ ID NO: 10195 - protein, 15 aa, Artificial Sequence
  Cyclic GFR-binding peptide
  MOD_RES (1)..(2): Xaa is C or S
XXVPARLSPINILYF

SEQ ID NO: 10196 - protein, 25 aa, Artificial Sequence
  Cyclic GFR-binding peptide
  MOD_RES (6)..(7): Xaa is C or S
KIPKAXXVPTELSPINMLYFDENEK

SEQ ID NO: 10197 - protein, 26 aa, Artificial Sequence
  Cyclic GFR-binding peptide
  MOD_RES (6)..(7): Xaa is C or S
KVGKAXXVPTKLSPINVLYFDDMGVP

SEQ ID NO: 10198 - protein, 24 aa, Artificial Sequence
  Cyclic GFR-binding peptide
  MOD_RES (6)..(7): Xaa is C or S
TVPKPXXAPTQLSPINVLYFDDSS

SEQ ID NO: 10199 - protein, 27 aa, Artificial Sequence
  Cyclic GFR-binding peptide
  MOD_RES (7)..(7): Xaa is C or S
HVTKPTXAPTKLSPINVLYFDDSSNVI

SEQ ID NO: 10200 - protein, 17 aa, Artificial Sequence
  Cyclic GFR-binding peptide
  MOD_RES (3)..(4): Xaa is C or S
KPXXAPTQLSPINVLYF

SEQ ID NO: 10201 - protein, 15 aa, Artificial Sequence
  Cyclic GFR-binding peptide
SPINMLYFDNGRVLL

SEQ ID NO: 10202 - protein, 23 aa, Artificial Sequence
  Cyclic GFR-binding peptide
  MOD_RES (6)..(7): Xaa is C or S
HVPKPXXAPTKLSPINVLYFDDS

SEQ ID NO: 10203 - protein, 27 aa, Artificial Sequence
  Cyclic GFR-binding peptide
  MOD_RES (6)..(7): Xaa is C or S
KIPKAXXVPTELSPINMLYFDENEKVV

SEQ ID NO: 10204 - protein, 18 aa, Artificial Sequence
  Cyclic GFR-binding peptide
  MOD_RES (4)..(5): Xaa is C or S
PSTXXAPVKTSPINMLYF

SEQ ID NO: 10205 - protein, 15 aa, Artificial Sequence
  Cyclic GFR-binding peptide
SPINILYFDKGVVTY

SEQ ID NO: 10206 - protein, 18 aa, Artificial Sequence
  Cyclic GFR-binding peptide
  MOD_RES (4)..(5): Xaa is C or S
PPTXXVPTRLSPINILYF

SEQ ID NO: 10207 - protein, 18 aa, Artificial Sequence
  Cyclic GFR-binding peptide
  MOD_RES (4)..(5): Xaa is C or S
PKPXXAPTQLSPINVLYF

SEQ ID NO: 10208 - protein, 16 aa, Artificial Sequence
  Cyclic GFR-binding peptide
  MOD_RES (2)..(3): Xaa is C or S
AXXAPTKLSPINVLYF

SEQ ID NO: 10209 - protein, 26 aa, Artificial Sequence
  Cyclic GFR-binding peptide
  MOD_RES (6)..(7): Xaa is C or S
TVPKPXXAPTQLSPINVLYFDDSSNV

SEQ ID NO: 10210 - protein, 18 aa, Artificial Sequence
  Cyclic GFR-binding peptide
ARLSPINILYFDAANNVV

SEQ ID NO: 10211 - protein, 22 aa, Artificial Sequence
  Cyclic GFR-binding peptide
  MOD_RES (6)..(7): Xaa is C or S
YVPKPXXAPTKLSPINVLYFDD

SEQ ID NO: 10212 - protein, 24 aa, Artificial Sequence
  Cyclic GFR-binding peptide
  MOD_RES (6)..(7): Xaa is C or S
YVPKPXXAPTKLSPINVLYFDDSS

SEQ ID NO: 10213 - protein, 13 aa, Artificial Sequence
  Cyclic GFR-binding peptide
VPARLSPINILYF

SEQ ID NO: 10214 - protein, 19 aa, Artificial Sequence
  Cyclic GFR-binding peptide
PVKTSPINMLYFDNGRVLL

SEQ ID NO: 10215 - protein, 17 aa, Artificial Sequence
  Cyclic GFR-binding peptide
ELSPINMLYFDENEKVV

SEQ ID NO: 10216 - protein, 20 aa, Artificial Sequence
  Cyclic GFR-binding peptide
  MOD_RES (6)..(7): Xaa is C or S
HVPKPXXAPTKLSPINVLYF

SEQ ID NO: 10217 - protein, 15 aa, Artificial Sequence
  Cyclic GFR-binding peptide
  MOD_RES (1)..(2): Xaa is C or S
XXVPTRLSPINILYF

SEQ ID NO: 10218 - protein, 22 aa, Artificial Sequence
  Cyclic GFR-binding peptide
  MOD_RES (6)..(7): Xaa is C or S
KIPKAXXVPTELSPINMLYFDE

SEQ ID NO: 10219 - protein, 16 aa, Artificial Sequence
  Cyclic GFR-binding peptide
LSPINVLYFDSSNNVI

SEQ ID NO: 10220 - protein, 15 aa, Artificial Sequence
  Cyclic GFR-binding peptide
SPINVLYFDSSNNVI

SEQ ID NO: 10221 - protein, 16 aa, Artificial Sequence
  Cyclic GFR-binding peptide
  MOD_RES (3)..(3): Xaa is C or S
PTXAPTKLSPINVLYF

SEQ ID NO: 10222 - protein, 26 aa, Artificial Sequence
  Cyclic GFR-binding peptide
  MOD_RES (6)..(7): Xaa is C or S
YVPKPXXAPTKLSPINVLYFDDSSNV

SEQ ID NO: 10223 - protein, 21 aa, Artificial Sequence
  Cyclic GFR-binding peptide
  MOD_RES (6)..(7): Xaa is C or S
KIPKAXXVPTELSPINMLYFD

SEQ ID NO: 10224 - protein, 23 aa, Artificial Sequence
  Cyclic GFR-binding peptide
  MOD_RES (6)..(7): Xaa is C or S
TVPKPXXAPTQLSPINVLYFDDS

SEQ ID NO: 10225 - protein, 25 aa, Artificial Sequence
  Cyclic GFR-binding peptide
  MOD_RES (6)..(7): Xaa is C or S
YVPKPXXAPTKLSPINVLYFDDSSN

SEQ ID NO: 10226 - protein, 17 aa, Artificial Sequence
  Cyclic GFR-binding peptide
  MOD_RES (3)..(4): Xaa is C or S
KAXXVPTELSPINMLYF

SEQ ID NO: 10227 - protein, 23 aa, Artificial Sequence
  Cyclic GFR-binding peptide
  MOD_RES (6)..(7): Xaa is C or S
AAPASXXVPARLSPINILYFDAA

SEQ ID NO: 10228 - protein, 15 aa, Artificial Sequence
  Cyclic GFR-binding peptide
  MOD_RES (1)..(2): Xaa is C or S
XXVPTKLSPINILYF

SEQ ID NO: 10229 - protein, 22 aa, Artificial Sequence
  Cyclic GFR-binding peptide
  MOD_RES (6)..(7): Xaa is C or S
KVGKAXXVPTKLSPINVLYFDD

SEQ ID NO: 10230 - protein, 18 aa, Artificial Sequence
  Cyclic GFR-binding peptide
  MOD_RES (4)..(5): Xaa is C or S
GKAXXVPTKLSPINVLYF

SEQ ID NO: 10231 - protein, 19 aa, Artificial Sequence
  Cyclic GFR-binding peptide
  MOD_RES (5)..(6): Xaa is C or S
VPSTXXAPVKTSPINMLYF

SEQ ID NO: 10232 - protein, 15 aa, Artificial Sequence
  Cyclic GFR-binding peptide
  MOD_RES (1)..(2): Xaa is C or S
XXAPTQLSPINVLYF

SEQ ID NO: 10233 - protein, 19 aa, Artificial Sequence
  Cyclic GFR-binding peptide
PARLSPINILYFDAANNVV

SEQ ID NO: 10234 - protein, 24 aa, Artificial Sequence
  Cyclic GFR-binding peptide
  MOD_RES (6)..(7): Xaa is C or S
KASKAXXVPTKLSPINILYFDKGV

SEQ ID NO: 10235 - protein, 18 aa, Artificial Sequence
  Cyclic GFR-binding peptide
TKLSPINVLYFDSSNNVI

SEQ ID NO: 10236 - protein, 20 aa, Artificial Sequence
  Cyclic GFR-binding peptide
  MOD_RES (6)..(7): Xaa is C or S
YVPKPXXAPTKLSPINVLYF

SEQ ID NO: 10237 - protein, 24 aa, Artificial Sequence
  Cyclic GFR-binding peptide
  MOD_RES (6)..(7): Xaa is C or S
AVPKAXXAPTKLSPINVLYFDSSN

SEQ ID NO: 10238 - protein, 18 aa, Artificial Sequence
  Cyclic GFR-binding peptide
  MOD_RES (4)..(5): Xaa is C or S
PASXXVPARLSPINILYF

SEQ ID NO: 10239 - protein, 26 aa, Artificial Sequence
  Cyclic GFR-binding peptide
  MOD_RES (6)..(7): Xaa is C or S
STPPTXXVPTRLSPINILYFDSANNV

SEQ ID NO: 10240 - protein, 22 aa, Artificial Sequence
  Cyclic GFR-binding peptide
  MOD_RES (6)..(7): Xaa is C or S
TVPKPXXAPTQLSPINVLYFDD

SEQ ID NO: 10241 - protein, 14 aa, Artificial Sequence
  Cyclic GFR-binding peptide
  MOD_RES (1)..(1): Xaa is C or S
XAPVKTSPINMLYF

SEQ ID NO: 10242 - protein, 26 aa, Artificial Sequence
  Cyclic GFR-binding peptide
  MOD_RES (6)..(7): Xaa is C or S
KASKAXXVPTKLSPINILYFDKGVVT

SEQ ID NO: 10243 - protein, 23 aa, Artificial Sequence
  Cyclic GFR-binding peptide
  MOD_RES (6)..(7): Xaa is C or S
RVPSTXXAPVKTSPINMLYFDNG

SEQ ID NO: 10244 - protein, 26 aa, Artificial Sequence
  Cyclic GFR-binding peptide
  MOD_RES (6)..(7): Xaa is C or S
AAPASXXVPARLSPINILYFDAANNV

SEQ ID NO: 10245 - protein, 21 aa, Artificial Sequence
  Cyclic GFR-binding peptide
  MOD_RES (7)..(7): Xaa is C or S
HVTKPTXAPTKLSPINVLYFD

SEQ ID NO: 10246 - protein, 26 aa, Artificial Sequence
  Cyclic GFR-binding peptide
  MOD_RES (6)..(7): Xaa is C or S
RVPSTXXAPVKTSPINMLYFDNGRVL

SEQ ID NO: 10247 - protein, 25 aa, Artificial Sequence
  Cyclic GFR-binding peptide
  MOD_RES (6)..(7): Xaa is C or S
TVPKPXXAPTQLSPINVLYFDDSSN

SEQ ID NO: 10248 - protein, 18 aa, Artificial Sequence
  Cyclic GFR-binding peptide
VKTSPINMLYFDNGRVLL

SEQ ID NO: 10249 - protein, 23 aa, Artificial Sequence
  Cyclic GFR-binding peptide
  MOD_RES (6)..(7): Xaa is C or S
STPPTXXVPTRLSPINILYFDSA

SEQ ID NO: 10250 - protein, 17 aa, Artificial Sequence
  Cyclic GFR-binding peptide
KLSPINILYFDKGVVTY

SEQ ID NO: 10251 - protein, 25 aa, Artificial Sequence
  Cyclic GFR-binding peptide
  MOD_RES (6)..(7): Xaa is C or S
RVPSTXXAPVKTSPINMLYFDNGRV

SEQ ID NO: 10252 - protein, 18 aa, Artificial Sequence
  Cyclic GFR-binding peptide
TKLSPINILYFDKGVVTY

SEQ ID NO: 10253 - protein, 17 aa, Artificial Sequence
  Cyclic GFR-binding peptide
  MOD_RES (3)..(4): Xaa is C or S
ASXXVPARLSPINILYF

SEQ ID NO: 10254 - protein, 17 aa, Artificial Sequence
  Cyclic GFR-binding peptide
KLSPINVLYFDSSNNVI

SEQ ID NO: 10255 - protein, 14 aa, Artificial Sequence
  Cyclic GFR-binding peptide
  MOD_RES (1)..(1): Xaa is C or S
XAPTKLSPINVLYF

SEQ ID NO: 10256 - protein, 16 aa, Artificial Sequence
  Cyclic GFR-binding peptide
LSPINILYFDKGVVTY

SEQ ID NO: 10257 - protein, 24 aa, Artificial Sequence
  Cyclic GFR-binding peptide
  MOD_RES (6)..(7): Xaa is C or S
AAPASXXVPARLSPINILYFDAAN

SEQ ID NO: 10258 - protein, 20 aa, Artificial Sequence
  Cyclic GFR-binding peptide
  MOD_RES (6)..(7): Xaa is C or S
AVPKAXXAPTKLSPINVLYF

SEQ ID NO: 10259 - protein, 19 aa, Artificial Sequence
  Cyclic GFR-binding peptide
  MOD_RES (5)..(6): Xaa is C or S
TPPTXXVPTRLSPINILYF

SEQ ID NO: 10260 - protein, 19 aa, Artificial Sequence
  Cyclic GFR-binding peptide
PTKLSPINVLYFDDMGVPT

SEQ ID NO: 10261 - protein, 27 aa, Artificial Sequence
  Cyclic GFR-binding peptide
  MOD_RES (6)..(7): Xaa is C or S
YVPKPXXAPTKLSPINVLYFDDSSNVI

SEQ ID NO: 10262 - protein, 19 aa, Artificial Sequence
  Cyclic GFR-binding peptide
  MOD_RES (5)..(6): Xaa is C or S
VPKPXXAPTKLSPINVLYF

SEQ ID NO: 10263 - protein, 19 aa, Artificial Sequence
  Cyclic GFR-binding peptide
  MOD_RES (5)..(6): Xaa is C or S
ASKAXXVPTKLSPINILYF

SEQ ID NO: 10264 - protein, 17 aa, Artificial Sequence
  Cyclic GFR-binding peptide
  MOD_RES (3)..(4): Xaa is C or S
KAXXVPTKLSPINVLYF

SEQ ID NO: 10265 - protein, 20 aa, Artificial Sequence
  Cyclic GFR-binding peptide
  MOD_RES (6)..(7): Xaa is C or S
RVPSTXXAPVKTSPINMLYF

SEQ ID NO: 10266 - protein, 22 aa, Artificial Sequence
  Cyclic GFR-binding peptide
  MOD_RES (6)..(7): Xaa is C or S
STPPTXXVPTRLSPINILYFDS

SEQ ID NO: 10267 - protein, 21 aa, Artificial Sequence
  Cyclic GFR-binding peptide
  MOD_RES (6)..(7): Xaa is C or S
TVPKPXXAPTQLSPINVLYFD

SEQ ID NO: 10268 - protein, 16 aa, Artificial Sequence
  Cyclic GFR-binding peptide
  MOD_RES (2)..(3): Xaa is C or S
AXXVPTELSPINMLYF

SEQ ID NO: 10269 - protein, 26 aa, Artificial Sequence
  Cyclic GFR-binding peptide
  MOD_RES (6)..(7): Xaa is C or S
SIPKAXXVPTELSPINMLYFDEYDKV

SEQ ID NO: 10270 - protein, 25 aa, Artificial Sequence
  Cyclic GFR-binding peptide
  MOD_RES (6)..(7): Xaa is C or S
HVPKPXXAPTKLSPINVLYFDDSSN

SEQ ID NO: 10271 - protein, 25 aa, Artificial Sequence
  Cyclic GFR-binding peptide
  MOD_RES (6)..(7): Xaa is C or S
SIPKAXXVPTELSPINMLYFDEYDK

SEQ ID NO: 10272 - protein, 13 aa, Artificial Sequence
  Cyclic GFR-binding peptide
APTKLSPINVLYF

SEQ ID NO: 10273 - protein, 26 aa, Artificial Sequence
  Cyclic GFR-binding peptide
  MOD_RES (6)..(7): Xaa is C or S
HVPKPXXAPTKLSPINVLYFDDSSNV

SEQ ID NO: 10274 - protein, 21 aa, Artificial Sequence
  Cyclic GFR-binding peptide
  MOD_RES (6)..(7): Xaa is C or S
STPPTXXVPTRLSPINILYFD

SEQ ID NO: 10275 - protein, 14 aa, Artificial Sequence
  Cyclic GFR-binding peptide
  MOD_RES (1)..(1): Xaa is C or S
XVPTKLSPINILYF

SEQ ID NO: 10276 - protein, 27 aa, Artificial Sequence
  Cyclic GFR-binding peptide
  MOD_RES (6)..(7): Xaa is C or S
AVPKAXXAPTKLSPINVLYFDSSNNVI

SEQ ID NO: 10277 - protein, 16 aa, Artificial Sequence
  Cyclic GFR-binding peptide
  MOD_RES (2)..(3): Xaa is C or S
SXXVPARLSPINILYF

SEQ ID NO: 10278 - protein, 15 aa, Artificial Sequence
  Cyclic GFR-binding peptide
  MOD_RES (1)..(2): Xaa is C or S
XXAPVKTSPINMLYF

SEQ ID NO: 10279 - protein, 21 aa, Artificial Sequence
  Cyclic GFR-binding peptide
  MOD_RES (6)..(7): Xaa is C or S
AAPASXXVPARLSPINILYFD

SEQ ID NO: 10280 - protein, 14 aa, Artificial Sequence
  Cyclic GFR-binding peptide
  MOD_RES (1)..(1): Xaa is C or S
XAPTQLSPINVLYF

SEQ ID NO: 10281 - protein, 27 aa, Artificial Sequence
  Cyclic GFR-binding peptide
  MOD_RES (6)..(7): Xaa is C or S
KASKAXXVPTKLSPINILYFDKGVVTY

SEQ ID NO: 10282 - protein, 19 aa, Artificial Sequence
  Cyclic GFR-binding peptide
  MOD_RES (5)..(6): Xaa is C or S
IPKAXXVPTELSPINMLYF

SEQ ID NO: 10283 - protein, 27 aa, Artificial Sequence
  Cyclic GFR-binding peptide
  MOD_RES (6)..(7): Xaa is C or S
SIPKAXXVPTELSPINMLYFDEYDKVV

SEQ ID NO: 10284 - protein, 21 aa, Artificial Sequence
  Cyclic GFR-binding peptide
  MOD_RES (6)..(7): Xaa is C or S
KVGKAXXVPTKLSPINVLYFD

SEQ ID NO: 10285 - protein, 23 aa, Artificial Sequence
  Cyclic GFR-binding peptide
  MOD_RES (7)..(7): Xaa is C or S
HVTKPTXAPTKLSPINVLYFDDS

SEQ ID NO: 10286 - protein, 20 aa, Artificial Sequence
  Cyclic GFR-binding peptide
  MOD_RES (6)..(7): Xaa is C or S
AAPASXXVPARLSPINILYF

SEQ ID NO: 10287 - protein, 13 aa, Artificial Sequence
  Cyclic GFR-binding peptide
VPTKLSPINVLYF

SEQ ID NO: 10288 - protein, 18 aa, Artificial Sequence
  Cyclic GFR-binding peptide
TELSPINMLYFDENEKVV

SEQ ID NO: 10289 - protein, 26 aa, Artificial Sequence
  Cyclic GFR-binding peptide
  MOD_RES (6)..(7): Xaa is C or S
AVPKAXXAPTKLSPINVLYFDSSNNV

SEQ ID NO: 10290 - protein, 15 aa, Artificial Sequence
  Cyclic GFR-binding peptide
SPINVLYFDDMGVPT

SEQ ID NO: 10291 - protein, 17 aa, Artificial Sequence
  Cyclic GFR-binding peptide
RLSPINILYFDSANNVV

SEQ ID NO: 10292 - protein, 14 aa, Artificial Sequence
  Cyclic GFR-binding peptide
  MOD_RES (1)..(1): Xaa is C or S
XVPTRLSPINILYF

SEQ ID NO: 10293 - protein, 17 aa, Artificial Sequence
  Cyclic GFR-binding peptide
  MOD_RES (4)..(4): Xaa is C or S
KPTXAPTKLSPINVLYF

SEQ ID NO: 10294 - protein, 20 aa, Artificial Sequence
  Cyclic GFR-binding peptide
  MOD_RES (6)..(7): Xaa is C or S
KASKAXXVPTKLSPINILYF

SEQ ID NO: 10295 - protein, 20 aa, Artificial Sequence
  Cyclic GFR-binding peptide
  MOD_RES (6)..(7): Xaa is C or S
SIPKAXXVPTELSPINMLYF

SEQ ID NO: 10296 - protein, 17 aa, Artificial Sequence
  Cyclic GFR-binding peptide
  MOD_RES (3)..(4): Xaa is C or S
PTXXVPTRLSPINILYF

SEQ ID NO: 10297 - protein, 16 aa, Artificial Sequence
  Cyclic GFR-binding peptide
  MOD_RES (2)..(3): Xaa is C or S
TXXAPVKTSPINMLYF

SEQ ID NO: 10298 - protein, 15 aa, Artificial Sequence
  Cyclic GFR-binding peptide
SPINMLYFDEYDKVV

SEQ ID NO: 10299 - protein, 18 aa, Artificial Sequence
  Cyclic GFR-binding peptide
  MOD_RES (4)..(5): Xaa is C or S
PKAXXVPTELSPINMLYF

SEQ ID NO: 10300 - protein, 16 aa, Artificial Sequence
  Cyclic GFR-binding peptide
LSPINILYFDAANNVV

SEQ ID NO: 10301 - protein, 16 aa, Artificial Sequence
  Cyclic GFR-binding peptide
  MOD_RES (2)..(3): Xaa is C or S
PXXAPTKLSPINVLYF

SEQ ID NO: 10302 - protein, 15 aa, Artificial Sequence
  Cyclic GFR-binding peptide
SPINMLYFDENEKVV

SEQ ID NO: 10303 - protein, 19 aa, Artificial Sequence
  Cyclic GFR-binding peptide
  MOD_RES (5)..(6): Xaa is C or S
VPKAXXAPTKLSPINVLYF

SEQ ID NO: 10304 - protein, 13 aa, Artificial Sequence
  Cyclic GFR-binding peptide
APVKTSPINMLYF

SEQ ID NO: 10305 - protein, 24 aa, Artificial Sequence
  Cyclic GFR-binding peptide
  MOD_RES (6)..(7): Xaa is C or S
RVPSTXXAPVKTSPINMLYFDNGR

SEQ ID NO: 10306 - protein, 19 aa, Artificial Sequence
  Cyclic GFR-binding peptide
PTKLSPINILYFDKGVVTY

SEQ ID NO: 10307 - protein, 24 aa, Artificial Sequence
  Cyclic GFR-binding peptide
  MOD_RES (6)..(7): Xaa is C or S
SIPKAXXVPTELSPINMLYFDEYD

SEQ ID NO: 10308 - protein, 18 aa, Artificial Sequence
  Cyclic GFR-binding peptide
TKLSPINVLYFDDMGVPT

SEQ ID NO: 10309 - protein, 16 aa, Artificial Sequence
  Cyclic GFR-binding peptide
TSPINMLYFDNGRVLL

SEQ ID NO: 10310 - protein, 19 aa, Artificial Sequence
  Cyclic GFR-binding peptide
PTKLSPINVLYFDSSNNVI

SEQ ID NO: 10311 - protein, 23 aa, Artificial Sequence
  Cyclic GFR-binding peptide
  MOD_RES (6)..(7): Xaa is C or S
SIPKAXXVPTELSPINMLYFDEY

SEQ ID NO: 10312 - protein, 19 aa, Artificial Sequence
  Cyclic GFR-binding peptide
PTKLSPINVLYFDDSSNVI

SEQ ID NO: 10313 - protein, 14 aa, Artificial Sequence
  Cyclic GFR-binding peptide
  MOD_RES (1)..(1): Xaa is C or S
XVPTELSPINMLYF

SEQ ID NO: 10314 - protein, 19 aa, Artificial Sequence
  Cyclic GFR-binding peptide
  MOD_RES (5)..(6): Xaa is C or S
VPKPXXAPTQLSPINVLYF

SEQ ID NO: 10315 - protein, 16 aa, Artificial Sequence
  Cyclic GFR-binding peptide
LSPINILYFDSANNVV

SEQ ID NO: 10316 - protein, 16 aa, Artificial Sequence
  Cyclic GFR-binding peptide
  MOD_RES (2)..(3): Xaa is C or S
AXXVPTKLSPINVLYF

SEQ ID NO: 10317 - protein, 19 aa, Artificial Sequence
  Cyclic GFR-binding peptide
PTQLSPINVLYFDDSSNVI

SEQ ID NO: 10318 - protein, 24 aa, Artificial Sequence
  Cyclic GFR-binding peptide
  MOD_RES (6)..(7): Xaa is C or S
KIPKAXXVPTELSPINMLYFDENE

SEQ ID NO: 10319 - protein, 18 aa, Artificial Sequence
  Cyclic GFR-binding peptide
  MOD_RES (4)..(5): Xaa is C or S
PKPXXAPTKLSPINVLYF

SEQ ID NO: 10320 - protein, 25 aa, Artificial Sequence
  Cyclic GFR-binding peptide
  MOD_RES (6)..(7): Xaa is C or S
AAPASXXVPARLSPINILYFDAANN

SEQ ID NO: 10321 - protein, 19 aa, Artificial Sequence
  Cyclic GFR-binding peptide
PTELSPINMLYFDEYDKVV

SEQ ID NO: 10322 - protein, 19 aa, Artificial Sequence
  Cyclic GFR-binding peptide
PTRLSPINILYFDSANNVV

SEQ ID NO: 10323 - protein, 23 aa, Artificial Sequence
  Cyclic GFR-binding peptide
  MOD_RES (6)..(7): Xaa is C or S
KVGKAXXVPTKLSPINVLYFDDM

SEQ ID NO: 10324 - protein, 18 aa, Artificial Sequence
  Cyclic GFR-binding peptide
  MOD_RES (4)..(5): Xaa is C or S
SKAXXVPTKLSPINILYF

SEQ ID NO: 10325 - protein, 13 aa, Artificial Sequence
  Cyclic GFR-binding peptide
VPTELSPINMLYF

SEQ ID NO: 10326 - protein, 24 aa, Artificial Sequence
  Cyclic GFR-binding peptide
  MOD_RES (6)..(7): Xaa is C or S
STPPTXXVPTRLSPINILYFDSAN

SEQ ID NO: 10327 - protein, 16 aa, Artificial Sequence
  Cyclic GFR-binding peptide
  MOD_RES (2)..(3): Xaa is C or S
AXXVPTKLSPINILYF

SEQ ID NO: 10328 - protein, 22 aa, Artificial Sequence
  Cyclic GFR-binding peptide
  MOD_RES (6)..(7): Xaa is C or S
SIPKAXXVPTELSPINMLYFDE

SEQ ID NO: 10329 - protein, 16 aa, Artificial Sequence
  Cyclic GFR-binding peptide
LSPINVLYFDDSSNVI

SEQ ID NO: 10330 - protein, 21 aa, Artificial Sequence
  Cyclic GFR-binding peptide
  MOD_RES (6)..(7): Xaa is C or S
YVPKPXXAPTKLSPINVLYFD

SEQ ID NO: 10331 - protein, 15 aa, Artificial Sequence
  Cyclic GFR-binding peptide
  MOD_RES (1)..(2): Xaa is C or S
XXVPTKLSPINVLYF

SEQ ID NO: 10332 - protein, 23 aa, Artificial Sequence
  Cyclic GFR-binding peptide
  MOD_RES (6)..(7): Xaa is C or S
AVPKAXXAPTKLSPINVLYFDSS

SEQ ID NO: 10333 - protein, 15 aa, Artificial Sequence
  Cyclic GFR-binding peptide
SPINVLYFDDSSNVI

SEQ ID NO: 10334 - protein, 15 aa, Artificial Sequence
  Cyclic GFR-binding peptide
  MOD_RES (1)..(2): Xaa is C or S
XXAPTKLSPINVLYF

SEQ ID NO: 10335 - protein, 26 aa, Artificial Sequence
  Cyclic GFR-binding peptide
  MOD_RES (7)..(7): Xaa is C or S
HVTKPTXAPTKLSPINVLYFDDSSNV

SEQ ID NO: 10336 - protein, 17 aa, Artificial Sequence
  Cyclic GFR-binding peptide
RLSPINILYFDAANNVV

SEQ ID NO: 10337 - protein, 21 aa, Artificial Sequence
  Cyclic GFR-binding peptide
  MOD_RES (6)..(7): Xaa is C or S
AVPKAXXAPTKLSPINVLYFD

SEQ ID NO: 10338 - skipped

SEQ ID NO: 10339 - protein, 21 aa, Artificial Sequence
  Cyclic GFR-binding peptide
  MOD_RES (6)..(7): Xaa is C or S
HVPKPXXAPTKLSPINVLYFD

SEQ ID NO: 10340 - protein, 18 aa, Artificial Sequence
  Cyclic GFR-binding peptide
TRLSPINILYFDSANNVV

SEQ ID NO: 10341 - protein, 17 aa, Artificial Sequence
  Cyclic GFR-binding peptide
  MOD_RES (3)..(4): Xaa is C or S
STXXAPVKTSPINMLYF

SEQ ID NO: 10342 - protein, 15 aa, Artificial Sequence
  Cyclic GFR-binding peptide
  MOD_RES (2)..(2): Xaa is C or S
TXAPTKLSPINVLYF

SEQ ID NO: 10343 - protein, 27 aa, Artificial Sequence
  Cyclic GFR-binding peptide
  MOD_RES (6)..(7): Xaa is C or S
HVPKPXXAPTKLSPINVLYFDDSSNVI

SEQ ID NO: 10344 - protein, 26 aa, Artificial Sequence
  Cyclic GFR-binding peptide
  MOD_RES (6)..(7): Xaa is C or S
KIPKAXXVPTELSPINMLYFDENEKV

SEQ ID NO: 10345 - protein, 23 aa, Artificial Sequence
  Cyclic GFR-binding peptide
  MOD_RES (6)..(7): Xaa is C or S
KIPKAXXVPTELSPINMLYFDEN

SEQ ID NO: 10346 - protein, 16 aa, Artificial Sequence
  Cyclic GFR-binding peptide
  MOD_RES (2)..(3): Xaa is C or S
PXXAPTQLSPINVLYF

SEQ ID NO: 10347 - protein, 24 aa, Artificial Sequence
  Cyclic GFR-binding peptide
  MOD_RES (6)..(7): Xaa is C or S
KVGKAXXVPTKLSPINVLYFDDMG

SEQ ID NO: 10348 - protein, 22 aa, Artificial Sequence
  Cyclic GFR-binding peptide
  MOD_RES (6)..(7): Xaa is C or S
KASKAXXVPTKLSPINILYFDK

SEQ ID NO: 10349 - protein, 18 aa, Artificial Sequence
  Cyclic GFR-binding peptide
  MOD_RES (4)..(5): Xaa is C or S
PKAXXAPTKLSPINVLYF

SEQ ID NO: 10350 - protein, 19 aa, Artificial Sequence
  Cyclic GFR-binding peptide
  MOD_RES (5)..(6): Xaa is C or S
APASXXVPARLSPINILYF

SEQ ID NO: 10351 - protein, 25 aa, Artificial Sequence
  Cyclic GFR-binding peptide
  MOD_RES (6)..(7): Xaa is C or S
KVGKAXXVPTKLSPINVLYFDDMGV

SEQ ID NO: 10352 - protein, 24 aa, Artificial Sequence
  Cyclic GFR-binding peptide
  MOD_RES (7)..(7): Xaa is C or S
HVTKPTXAPTKLSPINVLYFDDSS

SEQ ID NO: 10353 - protein, 17 aa, Artificial Sequence
  Cyclic GFR-binding peptide
  MOD_RES (3)..(4): Xaa is C or S
KAXXVPTKLSPINILYF

SEQ ID NO: 10354 - protein, 16 aa, Artificial Sequence
  Cyclic GFR-binding peptide
LSPINMLYFDEYDKVV

SEQ ID NO: 10355 - protein, 22 aa, Artificial Sequence
  Cyclic GFR-binding peptide
  MOD_RES (6)..(7): Xaa is C or S
HVPKPXXAPTKLSPINVLYFDD

SEQ ID NO: 10356 - protein, 17 aa, Artificial Sequence
  Cyclic GFR-binding peptide
QLSPINVLYFDDSSNVI

SEQ ID NO: 10357 - protein, 17 aa, Artificial Sequence
  Cyclic GFR-binding peptide
  MOD_RES (3)..(4): Xaa is C or S
KPXXAPTKLSPINVLYF

SEQ ID NO: 10358 - protein, 27 aa, Artificial Sequence
  Cyclic GFR-binding peptide
  MOD_RES (6)..(7): Xaa is C or S
TVPKPXXAPTQLSPINVLYFDDSSNVI

SEQ ID NO: 10359 - protein, 20 aa, Artificial Sequence
  Cyclic GFR-binding peptide
  MOD_RES (6)..(7): Xaa is C or S
STPPTXXVPTRLSPINILYF

SEQ ID NO: 10360 - protein, 27 aa, Artificial Sequence
  Cyclic GFR-binding peptide
  MOD_RES (6)..(7): Xaa is C or S
RVPSTXXAPVKTSPINMLYFDNGRVLL

SEQ ID NO: 10361 - protein, 17 aa, Artificial Sequence
  Cyclic GFR-binding peptide
ELSPINMLYFDEYDKVV

SEQ ID NO: 10362 - protein, 21 aa, Artificial Sequence
  Cyclic GFR-binding peptide
  MOD_RES (6)..(7): Xaa is C or S
KASKAXXVPTKLSPINILYFD

SEQ ID NO: 10363 - protein, 19 aa, Artificial Sequence
  Cyclic GFR-binding peptide
  MOD_RES (5)..(6): Xaa is C or S
VGKAXXVPTKLSPINVLYF

SEQ ID NO: 10364 - protein, 18 aa, Artificial Sequence
  Cyclic GFR-binding peptide
TQLSPINVLYFDDSSNVI

SEQ ID NO: 10365 - protein, 15 aa, Artificial Sequence
  Cyclic GFR-binding peptide
SPINILYFDAANNVV

SEQ ID NO: 10366 - protein, 18 aa, Artificial Sequence
  Cyclic GFR-binding peptide
TKLSPINVLYFDDSSNVI

SEQ ID NO: 10367 - protein, 18 aa, Artificial Sequence
  Cyclic GFR-binding peptide
TELSPINMLYFDEYDKVV

SEQ ID NO: 10368 - protein, 15 aa, Artificial Sequence
  Cyclic GFR-binding peptide
SPINILYFDSANNVV

SEQ ID NO: 10369 - protein, 20 aa, Artificial Sequence
  Cyclic GFR-binding peptide
  MOD_RES (7)..(7): Xaa is C or S
HVTKPTXAPTKLSPINVLYF

SEQ ID NO: 10370 - protein, 22 aa, Artificial Sequence
  Cyclic GFR-binding peptide
  MOD_RES (6)..(7): Xaa is C or S
RVPSTXXAPVKTSPINMLYFDN

SEQ ID NO: 10371 - protein, 14 aa, Artificial Sequence
  Cyclic GFR-binding peptide
  MOD_RES (1)..(1): Xaa is C or S
XVPARLSPINILYF

SEQ ID NO: 10372 - protein, 22 aa, Artificial Sequence
  Cyclic GFR-binding peptide
  MOD_RES (6)..(7): Xaa is C or S
AVPKAXXAPTKLSPINVLYFDS

SEQ ID NO: 10373 - protein, 25 aa, Artificial Sequence
  Cyclic GFR-binding peptide
  MOD_RES (19)..(20): Xaa is C or S
VRGNDIYLMSIPSTKVPAXXTSPVR

SEQ ID NO: 10374 - protein, 20 aa, Artificial Sequence
  Cyclic GFR-binding peptide
  MOD_RES (14)..(15): Xaa is C or S
IYLMSIPSMKTPTXXPGASG

SEQ ID NO: 10375 - protein, 23 aa, Artificial Sequence
  Cyclic GFR-binding peptide
  MOD_RES (17)..(18): Xaa is C or S
KDNIYLMSIPSMKTPTXXPGASG

SEQ ID NO: 10376 - protein, 15 aa, Artificial Sequence
  Cyclic GFR-binding peptide
  MOD_RES (14)..(15): Xaa is C or S
IYLMSIPSTKVPAXX

SEQ ID NO: 10377 - protein, 23 aa, Artificial Sequence
  Cyclic GFR-binding peptide
  MOD_RES (17)..(18): Xaa is C or S
SDDIYLVSIPSLKTPAXXPKPVH

SEQ ID NO: 10378 - protein, 19 aa, Artificial Sequence
  Cyclic GFR-binding peptide
VVNNASDIYLISIPSLRTP

SEQ ID NO: 10379 - protein, 25 aa, Artificial Sequence
  Cyclic GFR-binding peptide
  MOD_RES (19)..(20): Xaa is C or S
QQKDNIYLMSIPSMKTPTXXPGASG

SEQ ID NO: 10380 - protein, 21 aa, Artificial Sequence
  Cyclic GFR-binding peptide
  MOD_RES (15)..(16): Xaa is C or S
DIYLISIPSLRTPVXXTPPTS

SEQ ID NO: 10381 - protein, 17 aa, Artificial Sequence
  Cyclic GFR-binding peptide
  MOD_RES (14)..(15): Xaa is C or S
IYLMSIPSMKTPTXXPG

SEQ ID NO: 10382 - protein, 14 aa, Artificial Sequence
  Cyclic GFR-binding peptide
  MOD_RES (14)..(14): Xaa is C or S
IYLMSIPSTKVPAX

SEQ ID NO: 10383 - protein, 19 aa, Artificial Sequence
  Cyclic GFR-binding peptide
  MOD_RES (14)..(15): Xaa is C or S
IYLISIPSLRTPVXXTPPT

SEQ ID NO: 10384 - protein, 17 aa, Artificial Sequence
  Cyclic GFR-binding peptide
LLVRGNDIYLMSIPSTK

SEQ ID NO: 10385 - protein, 27 aa, Artificial Sequence
  Cyclic GFR-binding peptide
  MOD_RES (21)..(22): Xaa is C or S
VVNNASDIYLISIPSLRTPVXXTPPTS

SEQ ID NO: 10386 - protein, 20 aa, Artificial Sequence
  Cyclic GFR-binding peptide
  MOD_RES (14)..(15): Xaa is C or S
IYLVSIPSLKTPAXXPKPVH

SEQ ID NO: 10387 - protein, 26 aa, Artificial Sequence
  Cyclic GFR-binding peptide
  MOD_RES (20)..(21): Xaa is C or S
VNSSDDIYLVSIPSLKTPAXXPKPVH

SEQ ID NO: 10388 - protein, 16 aa, Artificial Sequence
  Cyclic GFR-binding peptide
VVNNASDIYLISIPSL

SEQ ID NO: 10389 - protein, 22 aa, Artificial Sequence
  Cyclic GFR-binding peptide
  MOD_RES (16)..(17): Xaa is C or S
SDIYLISIPSLRTPVXXTPPTS

SEQ ID NO: 10390 - protein, 20 aa, Artificial Sequence
  Cyclic GFR-binding peptide
  MOD_RES (14)..(15): Xaa is C or S
IYLMSIPSTKVPAXXTSPVR

SEQ ID NO: 10391 - protein, 22 aa, Artificial Sequence
  Cyclic GFR-binding peptide
  MOD_RES (16)..(17): Xaa is C or S
DNIYLMSIPSMKTPTXXPGASG

SEQ ID NO: 10392 - protein, 25 aa, Artificial Sequence
  Cyclic GFR-binding peptide
  MOD_RES (19)..(20): Xaa is C or S
NNASDIYLISIPSLRTPVXXTPPTS

SEQ ID NO: 10393 - protein, 27 aa, Artificial Sequence
  Cyclic GFR-binding peptide
  MOD_RES (21)..(22): Xaa is C or S
IVNSSDDIYLVSIPSLKTPAXXPKPVH

SEQ ID NO: 10394 - protein, 16 aa, Artificial Sequence
  Cyclic GFR-binding peptide
  MOD_RES (14)..(15): Xaa is C or S
IYLMSIPSMKTPTXXP

SEQ ID NO: 10395 - protein, 18 aa, Artificial Sequence
  Cyclic GFR-binding peptide
  MOD_RES (14)..(15): Xaa is C or S
IYLISIPSLRTPVXXTPP

SEQ ID NO: 10396 - protein, 15 aa, Artificial Sequence
  Cyclic GFR-binding peptide
  MOD_RES (14)..(15): Xaa is C or S
IYLISIPSLRTPVXX

SEQ ID NO: 10397 - protein, 19 aa, Artificial Sequence
  Cyclic GFR-binding peptide
IIQQKDNIYLMSIPSMKTP

SEQ ID NO: 10398 - protein, 24 aa, Artificial Sequence
  Cyclic GFR-binding peptide
  MOD_RES (18)..(19): Xaa is C or S
RGNDIYLMSIPSTKVPAXXTSPVR

SEQ ID NO: 10399 - protein, 13 aa, Artificial Sequence
  Cyclic GFR-binding peptide
IYLISIPSLRTPV

SEQ ID NO: 10400 - protein, 27 aa, Artificial Sequence
  Cyclic GFR-binding peptide
  MOD_RES (21)..(22): Xaa is C or S
LLVRGNDIYLMSIPSTKVPAXXTSPVR

SEQ ID NO: 10401 - protein, 20 aa, Artificial Sequence
  Cyclic GFR-binding peptide
  MOD_RES (14)..(15): Xaa is C or S
IYLISIPSLRTPVXXTPPTS

SEQ ID NO: 10402 - protein, 13 aa, Artificial Sequence
  Cyclic GFR-binding peptide
IYLMSIPSTKVPA

SEQ ID NO: 10403 - protein, 17 aa, Artificial Sequence
  Cyclic GFR-binding peptide
VVNNASDIYLISIPSLR

SEQ ID NO: 10404 - protein, 21 aa, Artificial Sequence
  Cyclic GFR-binding peptide
  MOD_RES (15)..(16): Xaa is C or S
DIYLVSIPSLKTPAXXPKPVH

SEQ ID NO: 10405 - protein, 19 aa, Artificial Sequence
  Cyclic GFR-binding peptide
LLVRGNDIYLMSIPSTKVP

SEQ ID NO: 10406 - protein, 22 aa, Artificial Sequence
  Cyclic GFR-binding peptide
  MOD_RES (16)..(17): Xaa is C or S
DDIYLVSIPSLKTPAXXPKPVH

SEQ ID NO: 10407 - protein, 17 aa, Artificial Sequence
  Cyclic GFR-binding peptide
IIQQKDNIYLMSIPSMK

SEQ ID NO: 10408 - protein, 16 aa, Artificial Sequence
  Cyclic GFR-binding peptide
IIQQKDNIYLMSIPSM

SEQ ID NO: 10409 - protein, 17 aa, Artificial Sequence
  Cyclic GFR-binding peptide
  MOD_RES (14)..(15): Xaa is C or S
IYLISIPSLRTPVXXTP

SEQ ID NO: 10410 - protein, 22 aa, Artificial Sequence
  Cyclic GFR-binding peptide
  MOD_RES (16)..(17): Xaa is C or S
NDIYLMSIPSTKVPAXXTSPVR

SEQ ID NO: 10411 - protein, 19 aa, Artificial Sequence
  Cyclic GFR-binding peptide
  MOD_RES (14)..(15): Xaa is C or S
IYLMSIPSMKTPTXXPGAS

SEQ ID NO: 10412 - protein, 14 aa, Artificial Sequence
  Cyclic GFR-binding peptide
  MOD_RES (14)..(14): Xaa is C or S
IYLISIPSLRTPVX

SEQ ID NO: 10413 - protein, 24 aa, Artificial Sequence
  Cyclic GFR-binding peptide
  MOD_RES (18)..(19): Xaa is C or S
SSDDIYLVSIPSLKTPAXXPKPVH

SEQ ID NO: 10414 - protein, 26 aa, Artificial Sequence
  Cyclic GFR-binding peptide
  MOD_RES (20)..(21): Xaa is C or S
IQQKDNIYLMSIPSMKTPTXXPGASG

SEQ ID NO: 10415 - protein, 15 aa, Artificial Sequence
  Cyclic GFR-binding peptide
VVNNASDIYLISIPS

SEQ ID NO: 10416 - protein, 25 aa, Artificial Sequence
  Cyclic GFR-binding peptide
  MOD_RES (19)..(20): Xaa is C or S
NSSDDIYLVSIPSLKTPAXXPKPVH

SEQ ID NO: 10417 - protein, 13 aa, Artificial Sequence
  Cyclic GFR-binding peptide
IYLMSIPSMKTPT

SEQ ID NO: 10418 - protein, 24 aa, Artificial Sequence
  Cyclic GFR-binding peptide
  MOD_RES (18)..(19): Xaa is C or S
NASDIYLISIPSLRTPVXXTPPTS

SEQ ID NO: 10419 - protein, 16 aa, Artificial Sequence
  Cyclic GFR-binding peptide
LLVRGNDIYLMSIPST

SEQ ID NO: 10420 - protein, 19 aa, Artificial Sequence
  Cyclic GFR-binding peptide
  MOD_RES (14)..(15): Xaa is C or S
IYLMSIPSTKVPAXXTSPV

SEQ ID NO: 10421 - protein, 15 aa, Artificial Sequence
  Cyclic GFR-binding peptide
IIQQKDNIYLMSIPS

SEQ ID NO: 10422 - protein, 27 aa, Artificial Sequence
  Cyclic GFR-binding peptide
  MOD_RES (21)..(22): Xaa is C or S
IIQQKDNIYLMSIPSMKTPTXXPGASG

SEQ ID NO: 10423 - protein, 21 aa, Artificial Sequence
  Cyclic GFR-binding peptide
  MOD_RES (15)..(16): Xaa is C or S
NIYLMSIPSMKTPTXXPGASG

SEQ ID NO: 10424 - protein, 18 aa, Artificial Sequence
  Cyclic GFR-binding peptide
  MOD_RES (14)..(15): Xaa is C or S
IYLMSIPSTKVPAXXTSP

SEQ ID NO: 10425 - protein, 15 aa, Artificial Sequence
  Cyclic GFR-binding peptide
  MOD_RES (14)..(15): Xaa is C or S
IYLMSIPSMKTPTXX

SEQ ID NO: 10426 - protein, 21 aa, Artificial Sequence
  Cyclic GFR-binding peptide
  MOD_RES (15)..(16): Xaa is C or S
DIYLMSIPSTKVPAXXTSPVR

SEQ ID NO: 10427 - protein, 18 aa, Artificial Sequence
  Cyclic GFR-binding peptide
LLVRGNDIYLMSIPSTKV

SEQ ID NO: 10428 - protein, 16 aa, Artificial Sequence
  Cyclic GFR-binding peptide
  MOD_RES (14)..(15): Xaa is C or S
IYLISIPSLRTPVXXT

SEQ ID NO: 10429 - protein, 26 aa, Artificial Sequence
  Cyclic GFR-binding peptide
  MOD_RES (20)..(21): Xaa is C or S
LVRGNDIYLMSIPSTKVPAXXTSPVR

SEQ ID NO: 10430 - protein, 18 aa, Artificial Sequence
  Cyclic GFR-binding peptide
  MOD_RES (14)..(15): Xaa is C or S
IYLMSIPSMKTPTXXPGA

SEQ ID NO: 10431 - protein, 15 aa, Artificial Sequence
  Cyclic GFR-binding peptide
LLVRGNDIYLMSIPS

SEQ ID NO: 10432 - protein, 26 aa, Artificial Sequence
  Cyclic GFR-binding peptide
  MOD_RES (20)..(21): Xaa is C or S
VNNASDIYLISIPSLRTPVXXTPPTS

SEQ ID NO: 10433 - protein, 16 aa, Artificial Sequence
  Cyclic GFR-binding peptide
  MOD_RES (14)..(15): Xaa is C or S
IYLMSIPSTKVPAXXT

SEQ ID NO: 10434 - protein, 18 aa, Artificial Sequence
  Cyclic GFR-binding peptide
VVNNASDIYLISIPSLRT

SEQ ID NO: 10435 - protein, 23 aa, Artificial Sequence
  Cyclic GFR-binding peptide
  MOD_RES (17)..(18): Xaa is C or S
ASDIYLISIPSLRTPVXXTPPTS

SEQ ID NO: 10436 - protein, 18 aa, Artificial Sequence
  Cyclic GFR-binding peptide
IIQQKDNIYLMSIPSMKT

SEQ ID NO: 10437 - protein, 23 aa, Artificial Sequence
  Cyclic GFR-binding peptide
  MOD_RES (17)..(18): Xaa is C or S
GNDIYLMSIPSTKVPAXXTSPVR

SEQ ID NO: 10438 - protein, 17 aa, Artificial Sequence
  Cyclic GFR-binding peptide
  MOD_RES (14)..(15): Xaa is C or S
IYLMSIPSTKVPAXXTS

SEQ ID NO: 10439 - protein, 24 aa, Artificial Sequence
  Cyclic GFR-binding peptide
  MOD_RES (18)..(19): Xaa is C or S
QKDNIYLMSIPSMKTPTXXPGASG

SEQ ID NO: 10440 - protein, 14 aa, Artificial Sequence
  Cyclic GFR-binding peptide
  MOD_RES (14)..(14): Xaa is C or S
IYLMSIPSMKTPTX

SEQ ID NO: 10441 - protein, 25 aa, Artificial Sequence
  Cyclic GFR-binding peptide
  MOD_RES (6)..(7): Xaa is C or S
RVPSTXXAPVKTSPISMLYIDNGRV

SEQ ID NO: 10442 - protein, 20 aa, Artificial Sequence
  Cyclic GFR-binding peptide
  MOD_RES (6)..(7): Xaa is C or S
GSAGPXXTPTKMSPISMLYI

SEQ ID NO: 10443 - protein, 23 aa, Artificial Sequence
  Cyclic GFR-binding peptide
  MOD_RES (6)..(7): Xaa is C or S
GSAGPXXTPTKMSPISMLYINDK

SEQ ID NO: 10444 - protein, 15 aa, Artificial Sequence
  Cyclic GFR-binding peptide
  MOD_RES (1)..(2): Xaa is C or S
XXAPVKTSPISMLYI

SEQ ID NO: 10445 - protein, 23 aa, Artificial Sequence
  Cyclic GFR-binding peptide
  MOD_RES (6)..(7): Xaa is C or S
HVPKPXXAPTKLSPISVLYIDDS

SEQ ID NO: 10446 - protein, 19 aa, Artificial Sequence
  Cyclic GFR-binding peptide
PTRLSPISILYIDSANNVV

SEQ ID NO: 10447 - protein, 25 aa, Artificial Sequence
  Cyclic GFR-binding peptide
  MOD_RES (6)..(7): Xaa is C or S
GSAGPXXTPTKMSPISMLYINDKQQ

SEQ ID NO: 10448 - protein, 21 aa, Artificial Sequence
  Cyclic GFR-binding peptide
  MOD_RES (6)..(7): Xaa is C or S
STPPTXXVPTRLSPISILYID

SEQ ID NO: 10449 - protein, 17 aa, Artificial Sequence
  Cyclic GFR-binding peptide
  MOD_RES (3)..(4): Xaa is C or S
GPXXTPTKMSPISMLYI

SEQ ID NO: 10450 - protein, 14 aa, Artificial Sequence
  Cyclic GFR-binding peptide
  MOD_RES (1)..(1): Xaa is C or S
XAPVKTSPISMLYI

SEQ ID NO: 10451 - protein, 19 aa, Artificial Sequence
  Cyclic GFR-binding peptide
  MOD_RES (5)..(6): Xaa is C or S
TPPTXXVPTRLSPISILYI

SEQ ID NO: 10452 - protein, 17 aa, Artificial Sequence
  Cyclic GFR-binding peptide
KTSPISMLYIDNGRVLL

SEQ ID NO: 10453 - protein, 27 aa, Artificial Sequence
  Cyclic GFR-binding peptide
  MOD_RES (6)..(7): Xaa is C or S
STPPTXXVPTRLSPISILYIDSANNVV

SEQ ID NO: 10454 - protein, 20 aa, Artificial Sequence
  Cyclic GFR-binding peptide
  MOD_RES (6)..(7): Xaa is C or S
HVPKPXXAPTKLSPISVLYI

SEQ ID NO: 10455 - protein, 26 aa, Artificial Sequence
  Cyclic GFR-binding peptide
  MOD_RES (6)..(7): Xaa is C or S
HVPKPXXAPTKLSPISVLYIDDSSNV

SEQ ID NO: 10456 - protein, 16 aa, Artificial Sequence
  Cyclic GFR-binding peptide
LSPISILYIDSANNVV

SEQ ID NO: 10457 - protein, 22 aa, Artificial Sequence
  Cyclic GFR-binding peptide
  MOD_RES (6)..(7): Xaa is C or S
STPPTXXVPTRLSPISILYIDS

SEQ ID NO: 10458 - protein, 20 aa, Artificial Sequence
  Cyclic GFR-binding peptide
  MOD_RES (6)..(7): Xaa is C or S
RVPSTXXAPVKTSPISMLYI

SEQ ID NO: 10459 - protein, 22 aa, Artificial Sequence
  Cyclic GFR-binding peptide
  MOD_RES (6)..(7): Xaa is C or S
GSAGPXXTPTKMSPISMLYIND

SEQ ID NO: 10460 - protein, 25 aa, Artificial Sequence
  Cyclic GFR-binding peptide
  MOD_RES (6)..(7): Xaa is C or S
STPPTXXVPTRLSPISILYIDSANN

SEQ ID NO: 10461 - protein, 27 aa, Artificial Sequence
  Cyclic GFR-binding peptide
  MOD_RES (6)..(7): Xaa is C or S
HVPKPXXAPTKLSPISVLYIDDSSNVI

SEQ ID NO: 10462 - protein, 16 aa, Artificial Sequence
  Cyclic GFR-binding peptide
  MOD_RES (2)..(3): Xaa is C or S
PXXTPTKMSPISMLYI

SEQ ID NO: 10463 - protein, 18 aa, Artificial Sequence
  Cyclic GFR-binding peptide
  MOD_RES (4)..(5): Xaa is C or S
PPTXXVPTRLSPISILYI

SEQ ID NO: 10464 - protein, 15 aa, Artificial Sequence
  Cyclic GFR-binding peptide
  MOD_RES (1)..(2): Xaa is C or S
XXVPTRLSPISILYI

SEQ ID NO: 10465 - protein, 19 aa, Artificial Sequence
  Cyclic GFR-binding peptide
PTKMSPISMLYINDKQQII

SEQ ID NO: 10466 - protein, 24 aa, Artificial Sequence
  Cyclic GFR-binding peptide
  MOD_RES (6)..(7): Xaa is C or S
RVPSTXXAPVKTSPISMLYIDNGR

SEQ ID NO: 10467 - protein, 13 aa, Artificial Sequence
  Cyclic GFR-binding peptide
VPTRLSPISILYI

SEQ ID NO: 10468 - protein, 27 aa, Artificial Sequence
  Cyclic GFR-binding peptide
  MOD_RES (6)..(7): Xaa is C or S
RVPSTXXAPVKTSPISMLYIDNGRVLL

SEQ ID NO: 10469 - protein, 20 aa, Artificial Sequence
  Cyclic GFR-binding peptide
  MOD_RES (6)..(7): Xaa is C or S
STPPTXXVPTRLSPISILYI

SEQ ID NO: 10470 - protein, 13 aa, Artificial Sequence
  Cyclic GFR-binding peptide
APVKTSPISMLYI

SEQ ID NO: 10471 - protein, 17 aa, Artificial Sequence
  Cyclic GFR-binding peptide
RLSPISILYIDSANNVV

SEQ ID NO: 10472 - protein, 21 aa, Artificial Sequence
  Cyclic GFR-binding peptide
  MOD_RES (6)..(7): Xaa is C or S
HVPKPXXAPTKLSPISVLYID

SEQ ID NO: 10473 - protein, 19 aa, Artificial Sequence
  Cyclic GFR-binding peptide
PVKTSPISMLYIDNGRVLL

SEQ ID NO: 10474 - protein, 22 aa, Artificial Sequence
  Cyclic GFR-binding peptide
  MOD_RES (6)..(7): Xaa is C or S
HVPKPXXAPTKLSPISVLYIDD

SEQ ID NO: 10475 - protein, 17 aa, Artificial Sequence
  Cyclic GFR-binding peptide
KMSPISMLYINDKQQII

SEQ ID NO: 10476 - protein, 16 aa, Artificial Sequence
  Cyclic GFR-binding peptide
MSPISMLYINDKQQII

SEQ ID NO: 10477 - protein, 17 aa, Artificial Sequence
  Cyclic GFR-binding peptide
  MOD_RES (3)..(4): Xaa is C or S
PTXXVPTRLSPISILYI

SEQ ID NO: 10478 - protein, 22 aa, Artificial Sequence
  Cyclic GFR-binding peptide
  MOD_RES (6)..(7): Xaa is C or S
RVPSTXXAPVKTSPISMLYIDN

SEQ ID NO: 10479 - protein, 19 aa, Artificial Sequence
  Cyclic GFR-binding peptide
  MOD_RES (5)..(6): Xaa is C or S
SAGPXXTPTKMSPISMLYI

SEQ ID NO: 10480 - protein, 14 aa, Artificial Sequence
  Cyclic GFR-binding peptide
  MOD_RES (1)..(1): Xaa is C or S
XVPTRLSPISILYI

SEQ ID NO: 10481 - protein, 24 aa, Artificial Sequence
  Cyclic GFR-binding peptide
  MOD_RES (6)..(7): Xaa is C or S
HVPKPXXAPTKLSPISVLYIDDSS

SEQ ID NO: 10482 - protein, 26 aa, Artificial Sequence
  Cyclic GFR-binding peptide
  MOD_RES (6)..(7): Xaa is C or S
GSAGPXXTPTKMSPISMLYINDKQQI

SEQ ID NO: 10483 - protein, 15 aa, Artificial Sequence
  Cyclic GFR-binding peptide
SPISILYIDSANNVV

SEQ ID NO: 10484 - protein, 25 aa, Artificial Sequence
  Cyclic GFR-binding peptide
  MOD_RES (6)..(7): Xaa is C or S
HVPKPXXAPTKLSPISVLYIDDSSN

SEQ ID NO: 10485 - protein, 13 aa, Artificial Sequence
  Cyclic GFR-binding peptide
TPTKMSPISMLYI

SEQ ID NO: 10486 - protein, 24 aa, Artificial Sequence
  Cyclic GFR-binding peptide
  MOD_RES (6)..(7): Xaa is C or S
STPPTXXVPTRLSPISILYIDSAN

SEQ ID NO: 10487 - protein, 16 aa, Artificial Sequence
  Cyclic GFR-binding peptide
TSPISMLYIDNGRVLL

SEQ ID NO: 10488 - protein, 19 aa, Artificial Sequence
  Cyclic GFR-binding peptide
  MOD_RES (5)..(6): Xaa is C or S
VPSTXXAPVKTSPISMLYI

SEQ ID NO: 10489 - protein, 15 aa, Artificial Sequence
  Cyclic GFR-binding peptide
SPISMLYINDKQQII

SEQ ID NO: 10490 - protein, 27 aa, Artificial Sequence
  Cyclic GFR-binding peptide
  MOD_RES (6)..(7): Xaa is C or S
GSAGPXXTPTKMSPISMLYINDKQQII

SEQ ID NO: 10491 - protein, 21 aa, Artificial Sequence
  Cyclic GFR-binding peptide
  MOD_RES (6)..(7): Xaa is C or S
GSAGPXXTPTKMSPISMLYIN

SEQ ID NO: 10492 - protein, 18 aa, Artificial Sequence
  Cyclic GFR-binding peptide
  MOD_RES (4)..(5): Xaa is C or S
PSTXXAPVKTSPISMLYI

SEQ ID NO: 10493 - protein, 15 aa, Artificial Sequence
  Cyclic GFR-binding peptide
  MOD_RES (1)..(2): Xaa is C or S
XXTPTKMSPISMLYI

SEQ ID NO: 10494 - protein, 21 aa, Artificial Sequence
  Cyclic GFR-binding peptide
  MOD_RES (6)..(7): Xaa is C or S
RVPSTXXAPVKTSPISMLYID

SEQ ID NO: 10495 - protein, 18 aa, Artificial Sequence
  Cyclic GFR-binding peptide
VKTSPISMLYIDNGRVLL

SEQ ID NO: 10496 - protein, 16 aa, Artificial Sequence
  Cyclic GFR-binding peptide
  MOD_RES (2)..(3): Xaa is C or S
TXXVPTRLSPISILYI

SEQ ID NO: 10497 - protein, 26 aa, Artificial Sequence
  Cyclic GFR-binding peptide
  MOD_RES (6)..(7): Xaa is C or S
RVPSTXXAPVKTSPISMLYIDNGRVL

SEQ ID NO: 10498 - protein, 18 aa, Artificial Sequence
  Cyclic GFR-binding peptide
  MOD_RES (4)..(5): Xaa is C or S
AGPXXTPTKMSPISMLYI

SEQ ID NO: 10499 - protein, 15 aa, Artificial Sequence
  Cyclic GFR-binding peptide
SPISMLYIDNGRVLL

SEQ ID NO: 10500 - protein, 26 aa, Artificial Sequence
  Cyclic GFR-binding peptide
  MOD_RES (6)..(7): Xaa is C or S
STPPTXXVPTRLSPISILYIDSANNV

SEQ ID NO: 10501 - protein, 16 aa, Artificial Sequence
  Cyclic GFR-binding peptide
  MOD_RES (2)..(3): Xaa is C or S
TXXAPVKTSPISMLYI

SEQ ID NO: 10502 - protein, 18 aa, Artificial Sequence
  Cyclic GFR-binding peptide
TRLSPISILYIDSANNVV

SEQ ID NO: 10503 - protein, 23 aa, Artificial Sequence
  Cyclic GFR-binding peptide
  MOD_RES (6)..(7): Xaa is C or S
STPPTXXVPTRLSPISILYIDSA

SEQ ID NO: 10504 - protein, 18 aa, Artificial Sequence
  Cyclic GFR-binding peptide
TKMSPISMLYINDKQQII

SEQ ID NO: 10505 - protein, 23 aa, Artificial Sequence
  Cyclic GFR-binding peptide
  MOD_RES (6)..(7): Xaa is C or S
RVPSTXXAPVKTSPISMLYIDNG

SEQ ID NO: 10506 - protein, 17 aa, Artificial Sequence
  Cyclic GFR-binding peptide
  MOD_RES (3)..(4): Xaa is C or S
STXXAPVKTSPISMLYI

SEQ ID NO: 10507 - protein, 24 aa, Artificial Sequence
  Cyclic GFR-binding peptide
  MOD_RES (6)..(7): Xaa is C or S
GSAGPXXTPTKMSPISMLYINDKQ

SEQ ID NO: 10508 - protein, 14 aa, Artificial Sequence
  Cyclic GFR-binding peptide
  MOD_RES (1)..(1): Xaa is C or S
XTPTKMSPISMLYI

SEQ ID NO: 10509 - protein, 23 aa, Artificial Sequence
  Cyclic GFR-binding peptide
  MOD_RES (17)..(18): Xaa is C or S
SDDFFLVSLSSLKTPAXXPKPVH

SEQ ID NO: 10510 - protein, 18 aa, Artificial Sequence
  Cyclic GFR-binding peptide
IVNSSDDFFLVSLSSLKT

SEQ ID NO: 10511 - protein, 27 aa, Artificial Sequence
  Cyclic GFR-binding peptide
  MOD_RES (21)..(21): Xaa is C or S
IVNSSDDFFLVSLSSLKTPAXTPKTVH

SEQ ID NO: 10512 - protein, 15 aa, Artificial Sequence
  Cyclic GFR-binding peptide
  MOD_RES (14)..(14): Xaa is C or S
FFLVSLSSLKTPAXT

SEQ ID NO: 10513 - protein, 20 aa, Artificial Sequence
  Cyclic GFR-binding peptide
  MOD_RES (14)..(15): Xaa is C or S
FFLVSLSSLKTPAXXPKPVY

SEQ ID NO: 10514 - protein, 25 aa, Artificial Sequence
  Cyclic GFR-binding peptide
  MOD_RES (19)..(20): Xaa is C or S
NNSSDFFLVSLSSLKTPAXXAKPVA

SEQ ID NO: 10515 - protein, 23 aa, Artificial Sequence
  Cyclic GFR-binding peptide
  MOD_RES (17)..(18): Xaa is C or S
KDNFFLMSLSSMKTPTXXPGASG

SEQ ID NO: 10516 - protein, 24 aa, Artificial Sequence
  Cyclic GFR-binding peptide
  MOD_RES (18)..(19): Xaa is C or S
SSDDFFLVSLSSLQTPAXXPKPVT

SEQ ID NO: 10517 - protein, 20 aa, Artificial Sequence
  Cyclic GFR-binding peptide
  MOD_RES (14)..(15): Xaa is C or S
FFLISLSSLAQPVXXPAASA

SEQ ID NO: 10518 - protein, 25 aa, Artificial Sequence
  Cyclic GFR-binding peptide
  MOD_RES (19)..(20): Xaa is C or S
NNASDFFLISLSSLRTPVXXTPPTS

SEQ ID NO: 10519 - protein, 15 aa, Artificial Sequence
  Cyclic GFR-binding peptide
YTVVGKDFFLISLSS

SEQ ID NO: 10520 - protein, 18 aa, Artificial Sequence
  Cyclic GFR-binding peptide
  MOD_RES (14)..(14): Xaa is C or S
FFLMSLSSEETPVXELGE

SEQ ID NO: 10521 - protein, 19 aa, Artificial Sequence
  Cyclic GFR-binding peptide
  MOD_RES (14)..(15): Xaa is C or S
FFLVSLSSLKTPAXXAKPV

SEQ ID NO: 10522 - protein, 15 aa, Artificial Sequence
  Cyclic GFR-binding peptide
VVNNASDFFLISLSS

SEQ ID NO: 10523 - protein, 15 aa, Artificial Sequence
  Cyclic GFR-binding peptide
  MOD_RES (14)..(15): Xaa is C or S
FFLISLSSLDQSVXX

SEQ ID NO: 10524 - protein, 19 aa, Artificial Sequence
  Cyclic GFR-binding peptide
HQGQHPKIRFFLMSLSSEE

SEQ ID NO: 10525 - protein, 17 aa, Artificial Sequence
  Cyclic GFR-binding peptide
TPVGMDDFFLVSLSSLK

SEQ ID NO: 10526 - protein, 14 aa, Artificial Sequence
  Cyclic GFR-binding peptide
  MOD_RES (14)..(14): Xaa is C or S
FFLMSLSSMKTPTX

SEQ ID NO: 10527 - protein, 18 aa, Artificial Sequence
  Cyclic GFR-binding peptide
VVKDYEDFFLMSLSSLET

SEQ ID NO: 10528 - protein, 13 aa, Artificial Sequence
  Cyclic GFR-binding peptide
FFLMSLSSTKVPA

SEQ ID NO: 10529 - protein, 26 aa, Artificial Sequence
  Cyclic GFR-binding peptide
  MOD_RES (20)..(21): Xaa is C or S
VNSSDDFFLVSLSSLKTPAXXPKPVY

SEQ ID NO: 10530 - protein, 18 aa, Artificial Sequence
  Cyclic GFR-binding peptide
HQGQHPKIRFFLMSLSSE

SEQ ID NO: 10531 - protein, 18 aa, Artificial Sequence
  Cyclic GFR-binding peptide
  MOD_RES (14)..(15): Xaa is C or S
FFLVSLSSLKTPAXXAKP

SEQ ID NO: 10532 - protein, 18 aa, Artificial Sequence
  Cyclic GFR-binding peptide
IVNSSDDFFLVSLSSLQT

SEQ ID NO: 10533 - protein, 22 aa, Artificial Sequence
  Cyclic GFR-binding peptide
  MOD_RES (16)..(17): Xaa is C or S
DNFFLMSLSSMKTPTXXPGASG

SEQ ID NO: 10534 - protein, 16 aa, Artificial Sequence
  Cyclic GFR-binding peptide
  MOD_RES (14)..(15): Xaa is C or S
FFLMSLSSTKVPAXXT

SEQ ID NO: 10535 - protein, 27 aa, Artificial Sequence
  Cyclic GFR-binding peptide
  MOD_RES (23)..(23): Xaa is C or S
PKKRVYEFFLVSLSSHHVRSPQXKVSS

SEQ ID NO: 10536 - protein, 18 aa, Artificial Sequence
  Cyclic GFR-binding peptide
IVNNSSDFFLVSLSSLKT

SEQ ID NO: 10537 - protein, 22 aa, Artificial Sequence
  Cyclic GFR-binding peptide
  MOD_RES (18)..(18): Xaa is C or S
YEFFLVSLSSHHVRSPQXKVSS

SEQ ID NO: 10538 - protein, 19 aa, Artificial Sequence
  Cyclic GFR-binding peptide
LKPKKRVYEFFLVSLSSHH

SEQ ID NO: 10539 - protein, 23 aa, Artificial Sequence
  Cyclic GFR-binding peptide
  MOD_RES (17)..(18): Xaa is C or S
SDDFFLVSLSSLKTPAXXPKPVY

SEQ ID NO: 10540 - protein, 24 aa, Artificial Sequence
  Cyclic GFR-binding peptide
  MOD_RES (18)..(19): Xaa is C or S
GMDDFFLVSLSSLKTPVXXAKGVK

SEQ ID NO: 10541 - protein, 20 aa, Artificial Sequence
  Cyclic GFR-binding peptide
  MOD_RES (14)..(15): Xaa is C or S
FFLMSLSSLETPVXXAKPIS

SEQ ID NO: 10542 - protein, 17 aa, Artificial Sequence
  Cyclic GFR-binding peptide
LKPKKRVYEFFLVSLSS

SEQ ID NO: 10543 - protein, 22 aa, Artificial Sequence
  Cyclic GFR-binding peptide
  MOD_RES (16)..(17): Xaa is C or S
GIFFLISLSSLDQSVXXPSASA

SEQ ID NO: 10544 - protein, 17 aa, Artificial Sequence
  Cyclic GFR-binding peptide
IIQQKDNFFLMSLSSMK

SEQ ID NO: 10545 - protein, 22 aa, Artificial Sequence
  Cyclic GFR-binding peptide
  MOD_RES (16)..(17): Xaa is C or S
GVFFLISLSSLDQPVXXPSASA

SEQ ID NO: 10546 - protein, 19 aa, Artificial Sequence
  Cyclic GFR-binding peptide
LLVRGNDFFLMSLSSTKVP

SEQ ID NO: 10547 - protein, 18 aa, Artificial Sequence
  Cyclic GFR-binding peptide
VKPTRGVFFLISLSSLDQ

SEQ ID NO: 10548 - protein, 25 aa, Artificial Sequence
  Cyclic GFR-binding peptide
  MOD_RES (19)..(19): Xaa is C or S
NSSDDFFLVSLSSLKTPAXTPKTVH

SEQ ID NO: 10549 - protein, 17 aa, Artificial Sequence
  Cyclic GFR-binding peptide
  MOD_RES (14)..(14): Xaa is C or S
FFLMSLSSEETPVXELG

SEQ ID NO: 10550 - protein, 27 aa, Artificial Sequence
  Cyclic GFR-binding peptide
  MOD_RES (21)..(21): Xaa is C or S
GQHPKIRFFLMSLSSEETPVXELGEDN

SEQ ID NO: 10551 - protein, 13 aa, Artificial Sequence
  Cyclic GFR-binding peptide
FFLVSLSSLKTPA

SEQ ID NO: 10552 - protein, 21 aa, Artificial Sequence
  Cyclic GFR-binding peptide
LKPKKRVYEFFLVSLSSHHVR

SEQ ID NO: 10553 - protein, 18 aa, Artificial Sequence
  Cyclic GFR-binding peptide
YTVVGKDFFLISLSSLKT

SEQ ID NO: 10554 - protein, 22 aa, Artificial Sequence
  Cyclic GFR-binding peptide
  MOD_RES (16)..(17): Xaa is C or S
SDFFLISLSSLRTPVXXTPPTS

SEQ ID NO: 10555 - protein, 16 aa, Artificial Sequence
  Cyclic GFR-binding peptide
  MOD_RES (14)..(15): Xaa is C or S
FFLMSLSSLETPVXXA

SEQ ID NO: 10556 - protein, 17 aa, Artificial Sequence
  Cyclic GFR-binding peptide
IVNSSDDFFLVSLSSLQ

SEQ ID NO: 10557 - protein, 27 aa, Artificial Sequence
  Cyclic GFR-binding peptide
  MOD_RES (21)..(22): Xaa is C or S
VVNNAADFFLISLSSLRAPVXXSAPAA

SEQ ID NO: 10558 - protein, 18 aa, Artificial Sequence
  Cyclic GFR-binding peptide
  MOD_RES (14)..(15): Xaa is C or S
FFLVSLSSLQTPAXXPKP

SEQ ID NO: 10559 - protein, 23 aa, Artificial Sequence
  Cyclic GFR-binding peptide
  MOD_RES (17)..(18): Xaa is C or S
AADFFLISLSSLRAPVXXSAPAA

SEQ ID NO: 10560 - protein, 27 aa, Artificial Sequence
  Cyclic GFR-binding peptide
  MOD_RES (21)..(22): Xaa is C or S
LLVRGNDFFLMSLSSTKVPAXXTSPVR

SEQ ID NO: 10561 - protein, 21 aa, Artificial Sequence
  Cyclic GFR-binding peptide
  MOD_RES (15)..(16): Xaa is C or S
DFFLISLSSLRTPVXXTPPTS

SEQ ID NO: 10562 - protein, 27 aa, Artificial Sequence
  Cyclic GFR-binding peptide
  MOD_RES (21)..(22): Xaa is C or S
IVNSSDDFFLVSLSSLQTPAXXPKPVT

SEQ ID NO: 10563 - protein, 26 aa, Artificial Sequence
  Cyclic GFR-binding peptide
  MOD_RES (20)..(21): Xaa is C or S
TVVGKDFFLISLSSLKTPVXXAKSAK

SEQ ID NO: 10564 - protein, 15 aa, Artificial Sequence
  Cyclic GFR-binding peptide
  MOD_RES (14)..(15): Xaa is C or S
FFLISLSSLRTPVXX

SEQ ID NO: 10565 - protein, 19 aa, Artificial Sequence
  Cyclic GFR-binding peptide
VKPKRGVFFLISLSSLAQP

SEQ ID NO: 10566 - protein, 20 aa, Artificial Sequence
  Cyclic GFR-binding peptide
LKPKKRVYEFFLVSLSSHHV

SEQ ID NO: 10567 - protein, 16 aa, Artificial Sequence
  Cyclic GFR-binding peptide
  MOD_RES (14)..(15): Xaa is C or S
FFLISLSSLRAPVXXS

SEQ ID NO: 10568 - protein, 14 aa, Artificial Sequence
  Cyclic GFR-binding peptide
  MOD_RES (14)..(14): Xaa is C or S
FFLISLSSLDQPVX

SEQ ID NO: 10569 - protein, 17 aa, Artificial Sequence
  Cyclic GFR-binding peptide
IVNSSDDFFLVSLSSLK

SEQ ID NO: 10570 - protein, 19 aa, Artificial Sequence
  Cyclic GFR-binding peptide
  MOD_RES (14)..(15): Xaa is C or S
FFLVSLSSLQTPAXXPKPV

SEQ ID NO: 10571 - protein, 14 aa, Artificial Sequence
  Cyclic GFR-binding peptide
  MOD_RES (14)..(14): Xaa is C or S
FFLMSLSSLETPVX

SEQ ID NO: 10572 - protein, 14 aa, Artificial Sequence
  Cyclic GFR-binding peptide
  MOD_RES (14)..(14): Xaa is C or S
FFLVSLSSLQTPAX

SEQ ID NO: 10573 - protein, 14 aa, Artificial Sequence
  Cyclic GFR-binding peptide
  MOD_RES (14)..(14): Xaa is C or S
FFLISLSSLAQPVX

SEQ ID NO: 10574 - protein, 16 aa, Artificial Sequence
  Cyclic GFR-binding peptide
  MOD_RES (14)..(14): Xaa is C or S
FFLMSLSSEETPVXEL

SEQ ID NO: 10575 - protein, 15 aa, Artificial Sequence
  Cyclic GFR-binding peptide
  MOD_RES (14)..(15): Xaa is C or S
FFLMSLSSTKVPAXX

SEQ ID NO: 10576 - protein, 14 aa, Artificial Sequence
  Cyclic GFR-binding peptide
FFLVSLSSHHVRSP

SEQ ID NO: 10577 - protein, 19 aa, Artificial Sequence
  Cyclic GFR-binding peptide
  MOD_RES (14)..(15): Xaa is C or S
FFLISLSSLDQPVXXPSAS

SEQ ID NO: 10578 - protein, 16 aa, Artificial Sequence
  Cyclic GFR-binding peptide
  MOD_RES (14)..(15): Xaa is C or S
FFLISLSSLDQSVXXP

SEQ ID NO: 10579 - protein, 24 aa, Artificial Sequence
  Cyclic GFR-binding peptide
  MOD_RES (18)..(19): Xaa is C or S
SSDDFFLVSLSSLKTPAXXPKPVY

SEQ ID NO: 10580 - protein, 24 aa, Artificial Sequence
  Cyclic GFR-binding peptide
  MOD_RES (18)..(19): Xaa is C or S
RGNDFFLMSLSSTKVPAXXTSPVR

SEQ ID NO: 10581 - protein, 15 aa, Artificial Sequence
  Cyclic GFR-binding peptide
FFLVSLSSHHVRSPQ

SEQ ID NO: 10582 - protein, 15 aa, Artificial Sequence
  Cyclic GFR-binding peptide
VKPTRGVFFLISLSS

SEQ ID NO: 10583 - protein, 25 aa, Artificial Sequence
  Cyclic GFR-binding peptide
  MOD_RES (19)..(20): Xaa is C or S
PTKGIFFLISLSSLDQSVXXPSASA

SEQ ID NO: 10584 - protein, 14 aa, Artificial Sequence
  Cyclic GFR-binding peptide
  MOD_RES (14)..(14): Xaa is C or S
FFLISLSSLKTPVX

SEQ ID NO: 10585 - protein, 17 aa, Artificial Sequence
  Cyclic GFR-binding peptide
VVKDYEDFFLMSLSSLE

SEQ ID NO: 10586 - protein, 21 aa, Artificial Sequence
  Cyclic GFR-binding peptide
  MOD_RES (15)..(16): Xaa is C or S
DFFLVSLSSLKTPAXXPKPVY

SEQ ID NO: 10587 - protein, 13 aa, Artificial Sequence
  Cyclic GFR-binding peptide
FFLVSLSSLKTPV

SEQ ID NO: 10588 - protein, 24 aa, Artificial Sequence
  Cyclic GFR-binding peptide
  MOD_RES (18)..(19): Xaa is C or S
VGKDFFLISLSSLKTPVXXAKSAK

SEQ ID NO: 10589 - protein, 24 aa, Artificial Sequence
  Cyclic GFR-binding peptide
  MOD_RES (18)..(19): Xaa is C or S
NSSDFFLVSLSSLKTPAXXAKPVA

SEQ ID NO: 10590 - protein, 25 aa, Artificial Sequence
  Cyclic GFR-binding peptide
  MOD_RES (19)..(20): Xaa is C or S
VVGKDFFLISLSSLKTPVXXAKSAK

SEQ ID NO: 10591 - protein, 20 aa, Artificial Sequence
  Cyclic GFR-binding peptide
HQGQHPKIRFFLMSLSSEET

SEQ ID NO: 10592 - protein, 19 aa, Artificial Sequence
  Cyclic GFR-binding peptide
VVNNASDFFLISLSSLRTP

SEQ ID NO: 10593 - protein, 18 aa, Artificial Sequence
  Cyclic GFR-binding peptide
  MOD_RES (14)..(15): Xaa is C or S
FFLISLSSLAQPVXXPAA

SEQ ID NO: 10594 - protein, 28 aa, Artificial Sequence
  Cyclic GFR-binding peptide
  MOD_RES (22)..(22): Xaa is C or S
QGQHPKIRFFLMSLSSEETPVXELGEDN

SEQ ID NO: 10595 - protein, 19 aa, Artificial Sequence
  Cyclic GFR-binding peptide
VVKENEDFFLMSLSSLETP

SEQ ID NO: 10596 - protein, 19 aa, Artificial Sequence
  Cyclic GFR-binding peptide
VVNNAADFFLISLSSLRAP

SEQ ID NO: 10597 - protein, 22 aa, Artificial Sequence
  Cyclic GFR-binding peptide
  MOD_RES (16)..(17): Xaa is C or S
ADFFLISLSSLRAPVXXSAPAA

SEQ ID NO: 10598 - protein, 25 aa, Artificial Sequence
  Cyclic GFR-binding peptide
  MOD_RES (19)..(20): Xaa is C or S
NNAADFFLISLSSLRAPVXXSAPAA

SEQ ID NO: 10599 - protein, 18 aa, Artificial Sequence
  Cyclic GFR-binding peptide
  MOD_RES (14)..(15): Xaa is C or S
FFLMSLSSTKVPAXXTSP

SEQ ID NO: 10600 - protein, 24 aa, Artificial Sequence
  Cyclic GFR-binding peptide
  MOD_RES (18)..(18): Xaa is C or S
SSDDFFLVSLSSLKTPAXTPKTVH

SEQ ID NO: 10601 - protein, 26 aa, Artificial Sequence
  Cyclic GFR-binding peptide
  MOD_RES (20)..(20): Xaa is C or S
VNSSDDFFLVSLSSLKTPAXTPKTVH

SEQ ID NO: 10602 - protein, 24 aa, Artificial Sequence
  Cyclic GFR-binding peptide
  MOD_RES (18)..(19): Xaa is C or S
TRGVFFLISLSSLDQPVXXPSASA

SEQ ID NO: 10603 - protein, 16 aa, Artificial Sequence
  Cyclic GFR-binding peptide
  MOD_RES (14)..(15): Xaa is C or S
FFLVSLSSLKTPVXXA

SEQ ID NO: 10604 - protein, 16 aa, Artificial Sequence
  Cyclic GFR-binding peptide
VKPKRGVFFLISLSSL

SEQ ID NO: 10605 - protein, 22 aa, Artificial Sequence
  Cyclic GFR-binding peptide
  MOD_RES (16)..(17): Xaa is C or S
DDFFLVSLSSLKTPVXXAKGVK

SEQ ID NO: 10606 - protein, 16 aa, Artificial Sequence
  Cyclic GFR-binding peptide
  MOD_RES (14)..(15): Xaa is C or S
FFLVSLSSLKTPAXXP

SEQ ID NO: 10607 - protein, 16 aa, Artificial Sequence
  Cyclic GFR-binding peptide
  MOD_RES (14)..(15): Xaa is C or S
FFLVSLSSLQTPAXXP

SEQ ID NO: 10608 - protein, 20 aa, Artificial Sequence
  Cyclic GFR-binding peptide
  MOD_RES (14)..(15): Xaa is C or S
FFLVSLSSLKTPVXXAKGVK

SEQ ID NO: 10609 - protein, 18 aa, Artificial Sequence
  Cyclic GFR-binding peptide
  MOD_RES (14)..(15): Xaa is C or S
FFLISLSSLDQSVXXPSA

SEQ ID NO: 10610 - protein, 16 aa, Artificial Sequence
  Cyclic GFR-binding peptide
  MOD_RES (16)..(16): Xaa is C or S
FFLVSLSSHHVRSPQX

SEQ ID NO: 10611 - protein, 23 aa, Artificial Sequence
  Cyclic GFR-binding peptide
  MOD_RES (17)..(18): Xaa is C or S
SSDFFLVSLSSLKTPAXXAKPVA

SEQ ID NO: 10612 - protein, 14 aa, Artificial Sequence
  Cyclic GFR-binding peptide
  MOD_RES (14)..(14): Xaa is C or S
FFLVSLSSLKTPVX

SEQ ID NO: 10613 - protein, 15 aa, Artificial Sequence
  Cyclic GFR-binding peptide
TPVGMDDFFLVSLSS

SEQ ID NO: 10614 - protein, 19 aa, Artificial Sequence
  Cyclic GFR-binding peptide
IIQQKDNFFLMSLSSMKTP

SEQ ID NO: 10615 - protein, 25 aa, Artificial Sequence
  Cyclic GFR-binding peptide
  MOD_RES (19)..(20): Xaa is C or S
NSSDDFFLVSLSSLKTPAXXPKPVY

SEQ ID NO: 10616 - protein, 23 aa, Artificial Sequence
  Cyclic GFR-binding peptide
  MOD_RES (17)..(18): Xaa is C or S
GNDFFLMSLSSTKVPAXXTSPVR

SEQ ID NO: 10617 - protein, 17 aa, Artificial Sequence
  Cyclic GFR-binding peptide
  MOD_RES (14)..(15): Xaa is C or S
FFLISLSSLDQSVXXPS

SEQ ID NO: 10618 - protein, 15 aa, Artificial Sequence
  Cyclic GFR-binding peptide
  MOD_RES (14)..(15): Xaa is C or S
FFLISLSSLAQPVXX

SEQ ID NO: 10619 - protein, 16 aa, Artificial Sequence
  Cyclic GFR-binding peptide
IKPTKGIFFLISLSSL

SEQ ID NO: 10620 - protein, 27 aa, Artificial Sequence
  Cyclic GFR-binding peptide
  MOD_RES (21)..(22): Xaa is C or S
TPVGMDDFFLVSLSSLKTPVXXAKGVK

SEQ ID NO: 10621 - protein, 27 aa, Artificial Sequence
  Cyclic GFR-binding peptide
  MOD_RES (21)..(22): Xaa is C or S
VKPTRGVFFLISLSSLDQPVXXPSASA

SEQ ID NO: 10622 - protein, 15 aa, Artificial Sequence
  Cyclic GFR-binding peptide
IKPTKGIFFLISLSS

SEQ ID NO: 10623 - protein, 18 aa, Artificial Sequence
  Cyclic GFR-binding peptide
  MOD_RES (16)..(16): Xaa is C or S
FFLVSLSSHHVRSPQXKV

SEQ ID NO: 10624 - protein, 22 aa, Artificial Sequence
  Cyclic GFR-binding peptide
  MOD_RES (16)..(17): Xaa is C or S
EDFFLMSLSSLETPVXXAKPIK

SEQ ID NO: 10625 - protein, 16 aa, Artificial Sequence
  Cyclic GFR-binding peptide
IIQQKDNFFLMSLSSM

SEQ ID NO: 10626 - protein, 23 aa, Artificial Sequence
  Cyclic GFR-binding peptide
  MOD_RES (17)..(17): Xaa is C or S
KIRFFLMSLSSEETPVXELGEDN

SEQ ID NO: 10627 - protein, 19 aa, Artificial Sequence
  Cyclic GFR-binding peptide
  MOD_RES (14)..(15): Xaa is C or S
FFLISLSSLAQPVXXPAAS

SEQ ID NO: 10628 - protein, 27 aa, Artificial Sequence
  Cyclic GFR-binding peptide
  MOD_RES (21)..(22): Xaa is C or S
IVNSSDDFFLVSLSSLKTPAXXPKPVH

SEQ ID NO: 10629 - protein, 23 aa, Artificial Sequence
  Cyclic GFR-binding peptide
  MOD_RES (17)..(18): Xaa is C or S
KGIFFLISLSSLDQSVXXPSASA

SEQ ID NO: 10630 - protein, 22 aa, Artificial Sequence
  Cyclic GFR-binding peptide
  MOD_RES (16)..(17): Xaa is C or S
DDFFLVSLSSLKTPAXXPKPVY

SEQ ID NO: 10631 - protein, 17 aa, Artificial Sequence
  Cyclic GFR-binding peptide
  MOD_RES (14)..(15): Xaa is C or S
FFLISLSSLRTPVXXTP

SEQ ID NO: 10632 - protein, 26 aa, Artificial Sequence
  Cyclic GFR-binding peptide
  MOD_RES (20)..(21): Xaa is C or S
LVRGNDFFLMSLSSTKVPAXXTSPVR

SEQ ID NO: 10633 - protein, 17 aa, Artificial Sequence
  Cyclic GFR-binding peptide
  MOD_RES (14)..(15): Xaa is C or S
FFLMSLSSTKVPAXXTS

SEQ ID NO: 10634 - protein, 29 aa, Artificial Sequence
  Cyclic GFR-binding peptide
  MOD_RES (23)..(23): Xaa is C or S
HQGQHPKIRFFLMSLSSEETPVXELGEDN

SEQ ID NO: 10635 - protein, 27 aa, Artificial Sequence
  Cyclic GFR-binding peptide
  MOD_RES (21)..(22): Xaa is C or S
IVNNSSDFFLVSLSSLKTPAXXAKPVA

SEQ ID NO: 10636 - protein, 26 aa, Artificial Sequence
  Cyclic GFR-binding peptide
  MOD_RES (22)..(22): Xaa is C or S
KKRVYEFFLVSLSSHHVRSPQXKVSS

SEQ ID NO: 10637 - protein, 26 aa, Artificial Sequence
  Cyclic GFR-binding peptide
  MOD_RES (20)..(21): Xaa is C or S
VNNASDFFLISLSSLRTPVXXTPPTS

SEQ ID NO: 10638 - protein, 21 aa, Artificial Sequence
  Cyclic GFR-binding peptide
  MOD_RES (15)..(16): Xaa is C or S
DFFLVSLSSLKTPAXXPKPVH

SEQ ID NO: 10639 - protein, 15 aa, Artificial Sequence
  Cyclic GFR-binding peptide
VVNNAADFFLISLSS

SEQ ID NO: 10640 - protein, 15 aa, Artificial Sequence
  Cyclic GFR-binding peptide
  MOD_RES (14)..(15): Xaa is C or S
FFLVSLSSLKTPAXX

SEQ ID NO: 10641 - protein, 17 aa, Artificial Sequence
  Cyclic GFR-binding peptide
VKPTRGVFFLISLSSLD

SEQ ID NO: 10642 - protein, 14 aa, Artificial Sequence
  Cyclic GFR-binding peptide
  MOD_RES (14)..(14): Xaa is C or S
FFLISLSSLDQSVX

SEQ ID NO: 10643 - protein, 19 aa, Artificial Sequence
  Cyclic GFR-binding peptide
  MOD_RES (14)..(15): Xaa is C or S
FFLISLSSLRAPVXXSAPA

SEQ ID NO: 10644 - protein, 18 aa, Artificial Sequence
  Cyclic GFR-binding peptide
IIQQKDNFFLMSLSSMKT

SEQ ID NO: 10645 - protein, 13 aa, Artificial Sequence
  Cyclic GFR-binding peptide
FFLMSLSSLETPV

SEQ ID NO: 10646 - protein, 22 aa, Artificial Sequence
  Cyclic GFR-binding peptide
  MOD_RES (16)..(16): Xaa is C or S
IRFFLMSLSSEETPVXELGEDN

SEQ ID NO: 10647 - protein, 27 aa, Artificial Sequence
  Cyclic GFR-binding peptide
  MOD_RES (21)..(22): Xaa is C or S
VVKENEDFFLMSLSSLETPVXXAKPIK

SEQ ID NO: 10648 - protein, 25 aa, Artificial Sequence
  Cyclic GFR-binding peptide
  MOD_RES (19)..(20): Xaa is C or S
NSSDDFFLVSLSSLQTPAXXPKPVT

SEQ ID NO: 10649 - protein, 15 aa, Artificial Sequence
  Cyclic GFR-binding peptide
LLVRGNDFFLMSLSS

SEQ ID NO: 10650 - protein, 24 aa, Artificial Sequence
  Cyclic GFR-binding peptide
  MOD_RES (18)..(19): Xaa is C or S
DYEDFFLMSLSSLETPVXXAKPIS

SEQ ID NO: 10651 - protein, 18 aa, Artificial Sequence
  Cyclic GFR-binding peptide
  MOD_RES (14)..(15): Xaa is C or S
FFLVSLSSLKTPAXXPKP

SEQ ID NO: 10652 - protein, 21 aa, Artificial Sequence
  Cyclic GFR-binding peptide
  MOD_RES (15)..(16): Xaa is C or S
DFFLISLSSLRAPVXXSAPAA

SEQ ID NO: 10653 - protein, 21 aa, Artificial Sequence
  Cyclic GFR-binding peptide
  MOD_RES (15)..(16): Xaa is C or S
IFFLISLSSLDQSVXXPSASA

SEQ ID NO: 10654 - protein, 23 aa, Artificial Sequence
  Cyclic GFR-binding peptide
  MOD_RES (17)..(18): Xaa is C or S
SDDFFLVSLSSLQTPAXXPKPVT

SEQ ID NO: 10655 - protein, 22 aa, Artificial Sequence
  Cyclic GFR-binding peptide
  MOD_RES (16)..(16): Xaa is C or S
DDFFLVSLSSLKTPAXTPKTVH

SEQ ID NO: 10656 - protein, 14 aa, Artificial Sequence
  Cyclic GFR-binding peptide
  MOD_RES (14)..(14): Xaa is C or S
FFLISLSSLRAPVX

SEQ ID NO: 10657 - protein, 21 aa, Artificial Sequence
  Cyclic GFR-binding peptide
  MOD_RES (15)..(16): Xaa is C or S
DFFLISLSSLKTPVXXAKSAK

SEQ ID NO: 10658 - protein, 23 aa, Artificial Sequence
  Cyclic GFR-binding peptide
  MOD_RES (17)..(18): Xaa is C or S
ASDFFLISLSSLRTPVXXTPPTS

SEQ ID NO: 10659 - protein, 26 aa, Artificial Sequence
  Cyclic GFR-binding peptide
  MOD_RES (20)..(21): Xaa is C or S
VNNAADFFLISLSSLRAPVXXSAPAA

SEQ ID NO: 10660 - protein, 19 aa, Artificial Sequence
  Cyclic GFR-binding peptide
  MOD_RES (16)..(16): Xaa is C or S
FFLVSLSSHHVRSPQXKVS

SEQ ID NO: 10661 - protein, 19 aa, Artificial Sequence
  Cyclic GFR-binding peptide
  MOD_RES (14)..(15): Xaa is C or S
FFLMSLSSMKTPTXXPGAS

SEQ ID NO: 10662 - protein, 17 aa, Artificial Sequence
  Cyclic GFR-binding peptide
VVNNASDFFLISLSSLR

SEQ ID NO: 10663 - protein, 20 aa, Artificial Sequence
  Cyclic GFR-binding peptide
  MOD_RES (14)..(15): Xaa is C or S
FFLISLSSLDQPVXXPSASA

SEQ ID NO: 10664 - protein, 17 aa, Artificial Sequence
  Cyclic GFR-binding peptide
  MOD_RES (14)..(15): Xaa is C or S
FFLVSLSSLKTPAXXPK

SEQ ID NO: 10665 - protein, 17 aa, Artificial Sequence
  Cyclic GFR-binding peptide
  MOD_RES (14)..(15): Xaa is C or S
FFLISLSSLKTPVXXAK

SEQ ID NO: 10666 - protein, 13 aa, Artificial Sequence
  Cyclic GFR-binding peptide
FFLISLSSLDQPV

SEQ ID NO: 10667 - protein, 20 aa, Artificial Sequence
  Cyclic GFR-binding peptide
  MOD_RES (14)..(15): Xaa is C or S
FFLISLSSLRAPVXXSAPAA

SEQ ID NO: 10668 - protein, 15 aa, Artificial Sequence
  Cyclic GFR-binding peptide
VVKDYEDFFLMSLSS

SEQ ID NO: 10669 - protein, 21 aa, Artificial Sequence
  Cyclic GFR-binding peptide
  MOD_RES (15)..(16): Xaa is C or S
VFFLISLSSLAQPVXXPAASA

SEQ ID NO: 10670 - protein, 20 aa, Artificial Sequence
  Cyclic GFR-binding peptide
  MOD_RES (14)..(14): Xaa is C or S
FFLVSLSSLKTPAXTPKTVH

SEQ ID NO: 10671 - protein, 24 aa, Artificial Sequence
  Cyclic GFR-binding peptide
  MOD_RES (18)..(19): Xaa is C or S
NASDFFLISLSSLRTPVXXTPPTS

SEQ ID NO: 10672 - protein, 24 aa, Artificial Sequence
  Cyclic GFR-binding peptide
  MOD_RES (18)..(19): Xaa is C or S
KRGVFFLISLSSLAQPVXXPAASA

SEQ ID NO: 10673 - protein, 17 aa, Artificial Sequence
  Cyclic GFR-binding peptide
VVNNAADFFLISLSSLR

SEQ ID NO: 10674 - protein, 15 aa, Artificial Sequence
  Cyclic GFR-binding peptide
VKPKRGVFFLISLSS

SEQ ID NO: 10675 - protein, 15 aa, Artificial Sequence
  Cyclic GFR-binding peptide
IVNSSDDFFLVSLSS

SEQ ID NO: 10676 - protein, 29 aa, Artificial Sequence
  Cyclic GFR-binding peptide
  MOD_RES (25)..(25): Xaa is C or S
LKPKKRVYEFFLVSLSSHHVRSPQXKVSS

SEQ ID NO: 10677 - protein, 18 aa, Artificial Sequence
  Cyclic GFR-binding peptide
LLVRGNDFFLMSLSSTKV

SEQ ID NO: 10678 - protein, 20 aa, Artificial Sequence
  Cyclic GFR-binding peptide
  MOD_RES (16)..(16): Xaa is C or S
FFLVSLSSHHVRSPQXKVSS

SEQ ID NO: 10679 - protein, 15 aa, Artificial Sequence
  Cyclic GFR-binding peptide
  MOD_RES (14)..(15): Xaa is C or S
FFLISLSSLDQPVXX

SEQ ID NO: 10680 - protein, 23 aa, Artificial Sequence
  Cyclic GFR-binding peptide
  MOD_RES (17)..(18): Xaa is C or S
RGVFFLISLSSLDQPVXXPSASA

SEQ ID NO: 10681 - protein, 27 aa, Artificial Sequence
  Cyclic GFR-binding peptide
  MOD_RES (21)..(22): Xaa is C or S
IKPTKGIFFLISLSSLDQSVXXPSASA

SEQ ID NO: 10682 - protein, 25 aa, Artificial Sequence
  Cyclic GFR-binding peptide
  MOD_RES (19)..(20): Xaa is C or S
KDYEDFFLMSLSSLETPVXXAKPIS

SEQ ID NO: 10683 - protein, 16 aa, Artificial Sequence
  Cyclic GFR-binding peptide
IVNNSSDFFLVSLSSL

SEQ ID NO: 10684 - protein, 26 aa, Artificial Sequence
  Cyclic GFR-binding peptide
  MOD_RES (20)..(21): Xaa is C or S
VNSSDDFFLVSLSSLQTPAXXPKPVT

SEQ ID NO: 10685 - protein, 26 aa, Artificial Sequence
  Cyclic GFR-binding peptide
  MOD_RES (20)..(21): Xaa is C or S
KPTRGVFFLISLSSLDQPVXXPSASA

SEQ ID NO: 10686 - protein, 17 aa, Artificial Sequence
  Cyclic GFR-binding peptide
VKPKRGVFFLISLSSLA

SEQ ID NO: 10687 - protein, 19 aa, Artificial Sequence
  Cyclic GFR-binding peptide
IVNSSDDFFLVSLSSLKTP

SEQ ID NO: 10688 - protein, 18 aa, Artificial Sequence
  Cyclic GFR-binding peptide
VVNNASDFFLISLSSLRT

SEQ ID NO: 10689 - protein, 16 aa, Artificial Sequence
  Cyclic GFR-binding peptide
YTVVGKDFFLISLSSL

SEQ ID NO: 10690 - protein, 21 aa, Artificial Sequence
  Cyclic GFR-binding peptide
  MOD_RES (15)..(16): Xaa is C or S
DFFLVSLSSLKTPAXXAKPVA

SEQ ID NO: 10691 - protein, 20 aa, Artificial Sequence
  Cyclic GFR-binding peptide
  MOD_RES (14)..(15): Xaa is C or S
FFLISLSSLRTPVXXTPPTS

SEQ ID NO: 10692 - protein, 18 aa, Artificial Sequence
  Cyclic GFR-binding peptide
VVNNAADFFLISLSSLRA

SEQ ID NO: 10693 - protein, 25 aa, Artificial Sequence
  Cyclic GFR-binding peptide
  MOD_RES (19)..(20): Xaa is C or S
QQKDNFFLMSLSSMKTPTXXPGASG

SEQ ID NO: 10694 - protein, 19 aa, Artificial Sequence
  Cyclic GFR-binding peptide
  MOD_RES (14)..(15): Xaa is C or S
FFLVSLSSLKTPVXXAKGV

SEQ ID NO: 10695 - protein, 23 aa, Artificial Sequence
  Cyclic GFR-binding peptide
  MOD_RES (17)..(18): Xaa is C or S
NEDFFLMSLSSLETPVXXAKPIK

SEQ ID NO: 10696 - protein, 18 aa, Artificial Sequence
  Cyclic GFR-binding peptide
  MOD_RES (14)..(14): Xaa is C or S
FFLVSLSSLKTPAXTPKT

SEQ ID NO: 10697 - protein, 25 aa, Artificial Sequence
  Cyclic GFR-binding peptide
  MOD_RES (19)..(20): Xaa is C or S
PKRGVFFLISLSSLAQPVXXPAASA

SEQ ID NO: 10698 - protein, 20 aa, Artificial Sequence
  Cyclic GFR-binding peptide
  MOD_RES (14)..(14): Xaa is C or S
FFLMSLSSEETPVXELGEDN

SEQ ID NO: 10699 - protein, 19 aa, Artificial Sequence
  Cyclic GFR-binding peptide
VKPTRGVFFLISLSSLDQP

SEQ ID NO: 10700 - protein, 19 aa, Artificial Sequence
  Cyclic GFR-binding peptide
VVKDYEDFFLMSLSSLETP

SEQ ID NO: 10701 - protein, 17 aa, Artificial Sequence
  Cyclic GFR-binding peptide
  MOD_RES (16)..(16): Xaa is C or S
FFLVSLSSHHVRSPQXK

SEQ ID NO: 10702 - protein, 26 aa, Artificial Sequence
  Cyclic GFR-binding peptide
  MOD_RES (20)..(21): Xaa is C or S
IQQKDNFFLMSLSSMKTPTXXPGASG

SEQ ID NO: 10703 - protein, 13 aa, Artificial Sequence
  Cyclic GFR-binding peptide
FFLISLSSLAQPV

SEQ ID NO: 10704 - protein, 22 aa, Artificial Sequence
  Cyclic GFR-binding peptide
  MOD_RES (16)..(17): Xaa is C or S
DDFFLVSLSSLQTPAXXPKPVT

SEQ ID NO: 10705 - protein, 19 aa, Artificial Sequence
  Cyclic GFR-binding peptide
YTVVGKDFFLISLSSLKTP

SEQ ID NO: 10706 - protein, 25 aa, Artificial Sequence
  Cyclic GFR-binding peptide
  MOD_RES (19)..(20): Xaa is C or S
VRGNDFFLMSLSSTKVPAXXTSPVR

SEQ ID NO: 10707 - protein, 19 aa, Artificial Sequence
  Cyclic GFR-binding peptide
IVNSSDDFFLVSLSSLQTP

SEQ ID NO: 10708 - protein, 16 aa, Artificial Sequence
  Cyclic GFR-binding peptide
  MOD_RES (14)..(15): Xaa is C or S
FFLISLSSLDQPVXXP

SEQ ID NO: 10709 - protein, 16 aa, Artificial Sequence
  Cyclic GFR-binding peptide
LLVRGNDFFLMSLSST

SEQ ID NO: 10710 - protein, 15 aa, Artificial Sequence
  Cyclic GFR-binding peptide
VVKENEDFFLMSLSS

SEQ ID NO: 10711 - protein, 17 aa, Artificial Sequence
  Cyclic GFR-binding peptide
HQGQHPKIRFFLMSLSS

SEQ ID NO: 10712 - protein, 15 aa, Artificial Sequence
  Cyclic GFR-binding peptide
  MOD_RES (14)..(15): Xaa is C or S
FFLISLSSLRAPVXX

SEQ ID NO: 10713 - protein, 22 aa, Artificial Sequence
  Cyclic GFR-binding peptide
  MOD_RES (16)..(17): Xaa is C or S
GVFFLISLSSLAQPVXXPAASA

SEQ ID NO: 10714 - protein, 18 aa, Artificial Sequence
  Cyclic GFR-binding peptide
  MOD_RES (14)..(15): Xaa is C or S
FFLMSLSSMKTPTXXPGA

SEQ ID NO: 10715 - protein, 19 aa, Artificial Sequence
  Cyclic GFR-binding peptide
IVNNSSDFFLVSLSSLKTP

SEQ ID NO: 10716 - protein, 13 aa, Artificial Sequence
  Cyclic GFR-binding peptide
FFLISLSSLKTPV

SEQ ID NO: 10717 - protein, 26 aa, Artificial Sequence
  Cyclic GFR-binding peptide
  MOD_RES (20)..(20): Xaa is C or S
QHPKIRFFLMSLSSEETPVXELGEDN

SEQ ID NO: 10718 - protein, 21 aa, Artificial Sequence
  Cyclic GFR-binding peptide
  MOD_RES (15)..(16): Xaa is C or S
DFFLMSLSSLETPVXXAKPIK

SEQ ID NO: 10719 - protein, 15 aa, Artificial Sequence
  Cyclic GFR-binding peptide
  MOD_RES (14)..(15): Xaa is C or S
FFLMSLSSLETPVXX

SEQ ID NO: 10720 - protein, 25 aa, Artificial Sequence
  Cyclic GFR-binding peptide
  MOD_RES (19)..(20): Xaa is C or S
NSSDDFFLVSLSSLKTPAXXPKPVH

SEQ ID NO: 10721 - protein, 18 aa, Artificial Sequence
  Cyclic GFR-binding peptide
IKPTKGIFFLISLSSLDQ

SEQ ID NO: 10722 - protein, 16 aa, Artificial Sequence
  Cyclic GFR-binding peptide
  MOD_RES (14)..(15): Xaa is C or S
FFLMSLSSMKTPTXXP

SEQ ID NO: 10723 - protein, 16 aa, Artificial Sequence
  Cyclic GFR-binding peptide
VVKDYEDFFLMSLSSL

SEQ ID NO: 10724 - protein, 13 aa, Artificial Sequence
  Cyclic GFR-binding peptide
FFLVSLSSLQTPA

SEQ ID NO: 10725 - protein, 18 aa, Artificial Sequence
  Cyclic GFR-binding peptide
  MOD_RES (14)..(15): Xaa is C or S
FFLISLSSLRTPVXXTPP

SEQ ID NO: 10726 - protein, 26 aa, Artificial Sequence
  Cyclic GFR-binding peptide
  MOD_RES (20)..(21): Xaa is C or S
PVGMDDFFLVSLSSLKTPVXXAKGVK

SEQ ID NO: 10727 - protein, 16 aa, Artificial Sequence
  Cyclic GFR-binding peptide
  MOD_RES (14)..(14): Xaa is C or S
FFLVSLSSLKTPAXTP

SEQ ID NO: 10728 - protein, 19 aa, Artificial Sequence
  Cyclic GFR-binding peptide
TPVGMDDFFLVSLSSLKTP

SEQ ID NO: 10729 - protein, 15 aa, Artificial Sequence
  Cyclic GFR-binding peptide
  MOD_RES (14)..(15): Xaa is C or S
FFLVSLSSLKTPVXX

SEQ ID NO: 10730 - protein, 20 aa, Artificial Sequence
  Cyclic GFR-binding peptide
  MOD_RES (14)..(15): Xaa is C or S
FFLMSLSSMKTPTXXPGASG

SEQ ID NO: 10731 - protein, 26 aa, Artificial Sequence
  Cyclic GFR-binding peptide
  MOD_RES (20)..(21): Xaa is C or S
KPTKGIFFLISLSSLDQSVXXPSASA

SEQ ID NO: 10732 - protein, 22 aa, Artificial Sequence
  Cyclic GFR-binding peptide
  MOD_RES (16)..(17): Xaa is C or S
KDFFLISLSSLKTPVXXAKSAK

SEQ ID NO: 10733 - protein, 13 aa, Artificial Sequence
  Cyclic GFR-binding peptide
FFLVSLSSHHVRS

SEQ ID NO: 10734 - protein, 18 aa, Artificial Sequence
  Cyclic GFR-binding peptide
  MOD_RES (14)..(15): Xaa is C or S
FFLISLSSLKTPVXXAKS

SEQ ID NO: 10735 - protein, 25 aa, Artificial Sequence
  Cyclic GFR-binding peptide
  MOD_RES (21)..(21): Xaa is C or S
KRVYEFFLVSLSSHHVRSPQXKVSS

SEQ ID NO: 10736 - protein, 16 aa, Artificial Sequence
  Cyclic GFR-binding peptide
  MOD_RES (14)..(15): Xaa is C or S
FFLISLSSLKTPVXXA

SEQ ID NO: 10737 - protein, 17 aa, Artificial Sequence
  Cyclic GFR-binding peptide
  MOD_RES (14)..(15): Xaa is C or S
FFLVSLSSLQTPAXXPK

SEQ ID NO: 10738 - protein, 17 aa, Artificial Sequence
  Cyclic GFR-binding peptide
  MOD_RES (14)..(15): Xaa is C or S
FFLVSLSSLKTPAXXAK

SEQ ID NO: 10739 - protein, 26 aa, Artificial Sequence
  Cyclic GFR-binding peptide
  MOD_RES (20)..(21): Xaa is C or S
VNNSSDFFLVSLSSLKTPAXXAKPVA

SEQ ID NO: 10740 - protein, 23 aa, Artificial Sequence
  Cyclic GFR-binding peptide
  MOD_RES (17)..(17): Xaa is C or S
SDDFFLVSLSSLKTPAXTPKTVH

SEQ ID NO: 10741 - protein, 13 aa, Artificial Sequence
  Cyclic GFR-binding peptide
FFLISLSSLRTPV

SEQ ID NO: 10742 - protein, 15 aa, Artificial Sequence
  Cyclic GFR-binding peptide
  MOD_RES (14)..(15): Xaa is C or S
FFLMSLSSMKTPTXX

SEQ ID NO: 10743 - protein, 27 aa, Artificial Sequence
  Cyclic GFR-binding peptide
  MOD_RES (21)..(22): Xaa is C or S
VVKDYEDFFLMSLSSLETPVXXAKPIS

SEQ ID NO: 10744 - protein, 20 aa, Artificial Sequence
  Cyclic GFR-binding peptide
  MOD_RES (14)..(15): Xaa is C or S
FFLMSLSSLETPVXXAKPIK

SEQ ID NO: 10745 - protein, 13 aa, Artificial Sequence
  Cyclic GFR-binding peptide
FFLMSLSSMKTPT

SEQ ID NO: 10746 - protein, 16 aa, Artificial Sequence
  Cyclic GFR-binding peptide
IVNSSDDFFLVSLSSL

SEQ ID NO: 10747 - protein, 14 aa, Artificial Sequence
  Cyclic GFR-binding peptide
  MOD_RES (14)..(14): Xaa is C or S
FFLMSLSSEETPVX

SEQ ID NO: 10748 - protein, 17 aa, Artificial Sequence
  Cyclic GFR-binding peptide
  MOD_RES (14)..(15): Xaa is C or S
FFLMSLSSMKTPTXXPG

SEQ ID NO: 10749 - protein, 20 aa, Artificial Sequence
  Cyclic GFR-binding peptide
  MOD_RES (14)..(15): Xaa is C or S
FFLVSLSSLQTPAXXPKPVT

SEQ ID NO: 10750 - protein, 18 aa, Artificial Sequence
  Cyclic GFR-binding peptide
VVKENEDFFLMSLSSLET

SEQ ID NO: 10751 - protein, 23 aa, Artificial Sequence
  Cyclic GFR-binding peptide
  MOD_RES (19)..(19): Xaa is C or S
VYEFFLVSLSSHHVRSPQXKVSS

SEQ ID NO: 10752 - protein, 18 aa, Artificial Sequence
  Cyclic GFR-binding peptide
  MOD_RES (14)..(15): Xaa is C or S
FFLISLSSLDQPVXXPSA

SEQ ID NO: 10753 - protein, 17 aa, Artificial Sequence
  Cyclic GFR-binding peptide
YTVVGKDFFLISLSSLK

SEQ ID NO: 10754 - protein, 26 aa, Artificial Sequence
  Cyclic GFR-binding peptide
  MOD_RES (20)..(21): Xaa is C or S
VNSSDDFFLVSLSSLKTPAXXPKPVH

SEQ ID NO: 10755 - protein, 21 aa, Artificial Sequence
  Cyclic GFR-binding peptide
  MOD_RES (15)..(15): Xaa is C or S
RFFLMSLSSEETPVXELGEDN

SEQ ID NO: 10756 - protein, 23 aa, Artificial Sequence
  Cyclic GFR-binding peptide
  MOD_RES (17)..(18): Xaa is C or S
YEDFFLMSLSSLETPVXXAKPIS

SEQ ID NO: 10757 - protein, 21 aa, Artificial Sequence
  Cyclic GFR-binding peptide
  MOD_RES (15)..(16): Xaa is C or S
DFFLMSLSSTKVPAXXTSPVR

SEQ ID NO: 10758 - protein, 24 aa, Artificial Sequence
  Cyclic GFR-binding peptide
  MOD_RES (18)..(19): Xaa is C or S
QKDNFFLMSLSSMKTPTXXPGASG

SEQ ID NO: 10759 - protein, 20 aa, Artificial Sequence
  Cyclic GFR-binding peptide
  MOD_RES (14)..(15): Xaa is C or S
FFLMSLSSTKVPAXXTSPVR

SEQ ID NO: 10760 - protein, 13 aa, Artificial Sequence
  Cyclic GFR-binding peptide
FFLISLSSLDQSV

SEQ ID NO: 10761 - protein, 27 aa, Artificial Sequence
  Cyclic GFR-binding peptide
  MOD_RES (21)..(22): Xaa is C or S
VVNNASDFFLISLSSLRTPVXXTPPTS

SEQ ID NO: 10762 - protein, 24 aa, Artificial Sequence
  Cyclic GFR-binding peptide
  MOD_RES (18)..(19): Xaa is C or S
NAADFFLISLSSLRAPVXXSAPAA

SEQ ID NO: 10763 - protein, 17 aa, Artificial Sequence
  Cyclic GFR-binding peptide
  MOD_RES (14)..(14): Xaa is C or S
FFLVSLSSLKTPAXTPK

SEQ ID NO: 10764 - protein, 19 aa, Artificial Sequence
  Cyclic GFR-binding peptide
IKPTKGIFFLISLSSLDQS

SEQ ID NO: 10765 - protein, 19 aa, Artificial Sequence
  Cyclic GFR-binding peptide
  MOD_RES (14)..(14): Xaa is C or S
FFLVSLSSLKTPAXTPKTV

SEQ ID NO: 10766 - protein, 18 aa, Artificial Sequence
  Cyclic GFR-binding peptide
  MOD_RES (14)..(15): Xaa is C or S
FFLISLSSLRAPVXXSAP

SEQ ID NO: 10767 - protein, 16 aa, Artificial Sequence
  Cyclic GFR-binding peptide
  MOD_RES (14)..(15): Xaa is C or S
FFLISLSSLRTPVXXT

SEQ ID NO: 10768 - protein, 18 aa, Artificial Sequence
  Cyclic GFR-binding peptide
  MOD_RES (14)..(15): Xaa is C or S
FFLMSLSSLETPVXXAKP

SEQ ID NO: 10769 - protein, 17 aa, Artificial Sequence
  Cyclic GFR-binding peptide
  MOD_RES (14)..(15): Xaa is C or S
FFLISLSSLRAPVXXSA

SEQ ID NO: 10770 - protein, 23 aa, Artificial Sequence
  Cyclic GFR-binding peptide
  MOD_RES (17)..(18): Xaa is C or S
GKDFFLISLSSLKTPVXXAKSAK

SEQ ID NO: 10771 - protein, 17 aa, Artificial Sequence
  Cyclic GFR-binding peptide
IVNNSSDFFLVSLSSLK

SEQ ID NO: 10772 - protein, 28 aa, Artificial Sequence
  Cyclic GFR-binding peptide
  MOD_RES (24)..(24): Xaa is C or S
KPKKRVYEFFLVSLSSHHVRSPQXKVSS

SEQ ID NO: 10773 - protein, 17 aa, Artificial Sequence
  Cyclic GFR-binding peptide
  MOD_RES (14)..(15): Xaa is C or S
FFLISLSSLAQPVXXPA

SEQ ID NO: 10774 - protein, 23 aa, Artificial Sequence
  Cyclic GFR-binding peptide
  MOD_RES (17)..(18): Xaa is C or S
MDDFFLVSLSSLKTPVXXAKGVK

SEQ ID NO: 10775 - protein, 22 aa, Artificial Sequence
  Cyclic GFR-binding peptide
  MOD_RES (16)..(17): Xaa is C or S
EDFFLMSLSSLETPVXXAKPIS

SEQ ID NO: 10776 - protein, 21 aa, Artificial Sequence
  Cyclic GFR-binding peptide
  MOD_RES (15)..(16): Xaa is C or S
DFFLMSLSSLETPVXXAKPIS

SEQ ID NO: 10777 - protein, 27 aa, Artificial Sequence
  Cyclic GFR-binding peptide
  MOD_RES (21)..(22): Xaa is C or S
IIQQKDNFFLMSLSSMKTPTXXPGASG

SEQ ID NO: 10778 - protein, 21 aa, Artificial Sequence
  Cyclic GFR-binding peptide
HQGQHPKIRFFLMSLSSEETP

SEQ ID NO: 10779 - protein, 19 aa, Artificial Sequence
  Cyclic GFR-binding peptide
  MOD_RES (14)..(15): Xaa is C or S
FFLMSLSSLETPVXXAKPI

SEQ ID NO: 10780 - protein, 19 aa, Artificial Sequence
  Cyclic GFR-binding peptide
  MOD_RES (14)..(15): Xaa is C or S
FFLMSLSSTKVPAXXTSPV

SEQ ID NO: 10781 - protein, 15 aa, Artificial Sequence
  Cyclic GFR-binding peptide
  MOD_RES (14)..(15): Xaa is C or S
FFLVSLSSLQTPAXX

SEQ ID NO: 10782 - protein, 27 aa, Artificial Sequence
  Cyclic GFR-binding peptide
  MOD_RES (21)..(22): Xaa is C or S
IVNSSDDFFLVSLSSLKTPAXXPKPVY

SEQ ID NO: 10783 - protein, 17 aa, Artificial Sequence
  Cyclic GFR-binding peptide
LLVRGNDFFLMSLSSTK

SEQ ID NO: 10784 - protein, 17 aa, Artificial Sequence
  Cyclic GFR-binding peptide
IKPTKGIFFLISLSSLD

SEQ ID NO: 10785 - protein, 15 aa, Artificial Sequence
  Cyclic GFR-binding peptide
IIQQKDNFFLMSLSS

SEQ ID NO: 10786 - protein, 13 aa, Artificial Sequence
  Cyclic GFR-binding peptide
FFLISLSSLRAPV

SEQ ID NO: 10787 - protein, 14 aa, Artificial Sequence
  Cyclic GFR-binding peptide
  MOD_RES (14)..(14): Xaa is C or S
FFLISLSSLRTPVX

SEQ ID NO: 10788 - protein, 15 aa, Artificial Sequence
  Cyclic GFR-binding peptide
  MOD_RES (14)..(15): Xaa is C or S
FFLISLSSLKTPVXX

SEQ ID NO: 10789 - protein, 20 aa, Artificial Sequence
  Cyclic GFR-binding peptide
  MOD_RES (14)..(15): Xaa is C or S
FFLISLSSLKTPVXXAKSAK

SEQ ID NO: 10790 - protein, 20 aa, Artificial Sequence
  Cyclic GFR-binding peptide
  MOD_RES (14)..(15): Xaa is C or S
FFLVSLSSLKTPAXXPKPVH

SEQ ID NO: 10791 - protein, 16 aa, Artificial Sequence
  Cyclic GFR-binding peptide
VVNNAADFFLISLSSL

SEQ ID NO: 10792 - protein, 22 aa, Artificial Sequence
  Cyclic GFR-binding peptide
  MOD_RES (16)..(17): Xaa is C or S
SDFFLVSLSSLKTPAXXAKPVA

SEQ ID NO: 10793 - protein, 16 aa, Artificial Sequence
  Cyclic GFR-binding peptide
VKPTRGVFFLISLSSL

SEQ ID NO: 10794 - protein, 25 aa, Artificial Sequence
  Cyclic GFR-binding peptide
  MOD_RES (19)..(20): Xaa is C or S
VGMDDFFLVSLSSLKTPVXXAKGVK

SEQ ID NO: 10795 - protein, 21 aa, Artificial Sequence
  Cyclic GFR-binding peptide
  MOD_RES (15)..(16): Xaa is C or S
DFFLVSLSSLKTPVXXAKGVK

SEQ ID NO: 10796 - protein, 19 aa, Artificial Sequence
  Cyclic GFR-binding peptide
  MOD_RES (14)..(15): Xaa is C or S
FFLISLSSLDQSVXXPSAS

SEQ ID NO: 10797 - protein, 16 aa, Artificial Sequence
  Cyclic GFR-binding peptide
  MOD_RES (14)..(15): Xaa is C or S
FFLVSLSSLKTPAXXA

SEQ ID NO: 10798 - protein, 24 aa, Artificial Sequence
  Cyclic GFR-binding peptide
  MOD_RES (18)..(19): Xaa is C or S
ENEDFFLMSLSSLETPVXXAKPIK

SEQ ID NO: 10799 - protein, 25 aa, Artificial Sequence
  Cyclic GFR-binding peptide
  MOD_RES (19)..(20): Xaa is C or S
PTRGVFFLISLSSLDQPVXXPSASA

SEQ ID NO: 10800 - protein, 22 aa, Artificial Sequence
  Cyclic GFR-binding peptide
  MOD_RES (16)..(17): Xaa is C or S
NDFFLMSLSSTKVPAXXTSPVR

SEQ ID NO: 10801 - protein, 23 aa, Artificial Sequence
  Cyclic GFR-binding peptide
  MOD_RES (17)..(18): Xaa is C or S
RGVFFLISLSSLAQPVXXPAASA

SEQ ID NO: 10802 - protein, 16 aa, Artificial Sequence
  Cyclic GFR-binding peptide
VVKENEDFFLMSLSSL

SEQ ID NO: 10803 - protein, 18 aa, Artificial Sequence
  Cyclic GFR-binding peptide
LKPKKRVYEFFLVSLSSH

SEQ ID NO: 10804 - protein, 26 aa, Artificial Sequence
  Cyclic GFR-binding peptide
  MOD_RES (20)..(21): Xaa is C or S
VKENEDFFLMSLSSLETPVXXAKPIK

SEQ ID NO: 10805 - protein, 19 aa, Artificial Sequence
  Cyclic GFR-binding peptide
  MOD_RES (14)..(15): Xaa is C or S
FFLVSLSSLKTPAXXPKPV

SEQ ID NO: 10806 - protein, 17 aa, Artificial Sequence
  Cyclic GFR-binding peptide
  MOD_RES (14)..(15): Xaa is C or S
FFLVSLSSLKTPVXXAK

SEQ ID NO: 10807 - protein, 19 aa, Artificial Sequence
  Cyclic GFR-binding peptide
  MOD_RES (14)..(14): Xaa is C or S
FFLMSLSSEETPVXELGED

SEQ ID NO: 10808 - protein, 14 aa, Artificial Sequence
  Cyclic GFR-binding peptide
  MOD_RES (14)..(14): Xaa is C or S
FFLVSLSSLKTPAX

SEQ ID NO: 10809 - protein, 17 aa, Artificial Sequence
  Cyclic GFR-binding peptide
VVKENEDFFLMSLSSLE

SEQ ID NO: 10810 - protein, 27 aa, Artificial Sequence
  Cyclic GFR-binding peptide
  MOD_RES (21)..(22): Xaa is C or S
YTVVGKDFFLISLSSLKTPVXXAKSAK

SEQ ID NO: 10811 - protein, 24 aa, Artificial Sequence
  Cyclic GFR-binding peptide
  MOD_RES (18)..(19): Xaa is C or S
TKGIFFLISLSSLDQSVXXPSASA

SEQ ID NO: 10812 - protein, 18 aa, Artificial Sequence
  Cyclic GFR-binding peptide
  MOD_RES (14)..(15): Xaa is C or S
FFLVSLSSLKTPVXXAKG

SEQ ID NO: 10813 - protein, 27 aa, Artificial Sequence
  Cyclic GFR-binding peptide
  MOD_RES (21)..(22): Xaa is C or S
VKPKRGVFFLISLSSLAQPVXXPAASA

SEQ ID NO: 10814 - protein, 20 aa, Artificial Sequence
  Cyclic GFR-binding peptide
  MOD_RES (14)..(15): Xaa is C or S
FFLISLSSLDQSVXXPSASA

SEQ ID NO: 10815 - protein, 24 aa, Artificial Sequence
  Cyclic GFR-binding peptide
  MOD_RES (18)..(19): Xaa is C or S
SSDDFFLVSLSSLKTPAXXPKPVH

SEQ ID NO: 10816 - protein, 18 aa, Artificial Sequence
  Cyclic GFR-binding peptide
TPVGMDDFFLVSLSSLKT

SEQ ID NO: 10817 - protein, 26 aa, Artificial Sequence
  Cyclic GFR-binding peptide
  MOD_RES (20)..(21): Xaa is C or S
KPKRGVFFLISLSSLAQPVXXPAASA

SEQ ID NO: 10818 - protein, 16 aa, Artificial Sequence
  Cyclic GFR-binding peptide
VVNNASDFFLISLSSL

SEQ ID NO: 10819 - protein, 13 aa, Artificial Sequence
  Cyclic GFR-binding peptide
FFLMSLSSEETPV

SEQ ID NO: 10820 - protein, 18 aa, Artificial Sequence
  Cyclic GFR-binding peptide
VKPKRGVFFLISLSSLAQ

SEQ ID NO: 10821 - protein, 22 aa, Artificial Sequence
  Cyclic GFR-binding peptide
  MOD_RES (16)..(17): Xaa is C or S
DDFFLVSLSSLKTPAXXPKPVH

SEQ ID NO: 10822 - protein, 25 aa, Artificial Sequence
  Cyclic GFR-binding peptide
  MOD_RES (19)..(19): Xaa is C or S
HPKIRFFLMSLSSEETPVXELGEDN

SEQ ID NO: 10823 - protein, 17 aa, Artificial Sequence
  Cyclic GFR-binding peptide
  MOD_RES (14)..(15): Xaa is C or S
FFLMSLSSLETPVXXAK

SEQ ID NO: 10824 - protein, 21 aa, Artificial Sequence
  Cyclic GFR-binding peptide
  MOD_RES (15)..(15): Xaa is C or S
DFFLVSLSSLKTPAXTPKTVH

SEQ ID NO: 10825 - protein, 16 aa, Artificial Sequence
  Cyclic GFR-binding peptide
TPVGMDDFFLVSLSSL

SEQ ID NO: 10826 - protein, 16 aa, Artificial Sequence
  Cyclic GFR-binding peptide
  MOD_RES (14)..(15): Xaa is C or S
FFLISLSSLAQPVXXP

SEQ ID NO: 10827 - protein, 20 aa, Artificial Sequence
  Cyclic GFR-binding peptide
  MOD_RES (14)..(15): Xaa is C or S
FFLVSLSSLKTPAXXAKPVA

SEQ ID NO: 10828 - protein, 19 aa, Artificial Sequence
  Cyclic GFR-binding peptide
  MOD_RES (14)..(15): Xaa is C or S
FFLISLSSLRTPVXXTPPT

SEQ ID NO: 10829 - protein, 21 aa, Artificial Sequence
  Cyclic GFR-binding peptide
  MOD_RES (17)..(17): Xaa is C or S
EFFLVSLSSHHVRSPQXKVSS

SEQ ID NO: 10830 - protein, 19 aa, Artificial Sequence
  Cyclic GFR-binding peptide
  MOD_RES (14)..(15): Xaa is C or S
FFLISLSSLKTPVXXAKSA

SEQ ID NO: 10831 - protein, 15 aa, Artificial Sequence
  Cyclic GFR-binding peptide
IVNNSSDFFLVSLSS

SEQ ID NO: 10832 - protein, 25 aa, Artificial Sequence
  Cyclic GFR-binding peptide
  MOD_RES (19)..(20): Xaa is C or S
KENEDFFLMSLSSLETPVXXAKPIK

SEQ ID NO: 10833 - protein, 15 aa, Artificial Sequence
  Cyclic GFR-binding peptide
  MOD_RES (14)..(14): Xaa is C or S
FFLMSLSSEETPVXE

SEQ ID NO: 10834 - protein, 21 aa, Artificial Sequence
  Cyclic GFR-binding peptide
  MOD_RES (15)..(16): Xaa is C or S
VFFLISLSSLDQPVXXPSASA

SEQ ID NO: 10835 - protein, 21 aa, Artificial Sequence
  Cyclic GFR-binding peptide
  MOD_RES (15)..(16): Xaa is C or S
DFFLVSLSSLQTPAXXPKPVT

SEQ ID NO: 10836 - protein, 21 aa, Artificial Sequence
  Cyclic GFR-binding peptide
  MOD_RES (15)..(16): Xaa is C or S
NFFLMSLSSMKTPTXXPGASG

SEQ ID NO: 10837 - protein, 26 aa, Artificial Sequence
  Cyclic GFR-binding peptide
  MOD_RES (20)..(21): Xaa is C or S
VKDYEDFFLMSLSSLETPVXXAKPIS

SEQ ID NO: 10838 - protein, 14 aa, Artificial Sequence
  Cyclic GFR-binding peptide
  MOD_RES (14)..(14): Xaa is C or S
FFLMSLSSTKVPAX

SEQ ID NO: 10839 - protein, 17 aa, Artificial Sequence
  Cyclic GFR-binding peptide
  MOD_RES (14)..(15): Xaa is C or S
FFLISLSSLDQPVXXPS

SEQ ID NO: 10840 - protein, 23 aa, Artificial Sequence
  Cyclic GFR-binding peptide
  MOD_RES (6)..(7): Xaa is C or S
HVPKPXXAPTKLSSLSVLFFDDS

SEQ ID NO: 10841 - protein, 18 aa, Artificial Sequence
  Cyclic GFR-binding peptide
TKLSSLSVLFFDDSSNVI

SEQ ID NO: 10842 - protein, 27 aa, Artificial Sequence
  Cyclic GFR-binding peptide
  MOD_RES (7)..(7): Xaa is C or S
HVTKPTXAPTKLSSLSVLFFDDSSNVI

SEQ ID NO: 10843 - protein, 15 aa, Artificial Sequence
  Cyclic GFR-binding peptide
  MOD_RES (2)..(2): Xaa is C or S
TXAPTKLSSLSVLFF

SEQ ID NO: 10844 - protein, 20 aa, Artificial Sequence
  Cyclic GFR-binding peptide
  MOD_RES (6)..(7): Xaa is C or S
YVPKPXXAPTKLSSLSVLFF

SEQ ID NO: 10845 - protein, 25 aa, Artificial Sequence
  Cyclic GFR-binding peptide
  MOD_RES (6)..(7): Xaa is C or S
AVPKAXXAPTKLSSLSVLFFDSSNN

SEQ ID NO: 10846 - protein, 23 aa, Artificial Sequence
  Cyclic GFR-binding peptide
  MOD_RES (6)..(7): Xaa is C or S
GSAGPXXTPTKMSSLSMLFFNDK

SEQ ID NO: 10847 - protein, 24 aa, Artificial Sequence
  Cyclic GFR-binding peptide
  MOD_RES (6)..(7): Xaa is C or S
TVPKPXXAPTQLSSLSVLFFDDSS

SEQ ID NO: 10848 - protein, 20 aa, Artificial Sequence
  Cyclic GFR-binding peptide
  MOD_RES (6)..(7): Xaa is C or S
ASAAPXXVPQALSSLSILFF

SEQ ID NO: 10849 - protein, 25 aa, Artificial Sequence
  Cyclic GFR-binding peptide
  MOD_RES (6)..(7): Xaa is C or S
STPPTXXVPTRLSSLSILFFDSANN

SEQ ID NO: 10850 - protein, 15 aa, Artificial Sequence
  Cyclic GFR-binding peptide
SSLSILFFDKGVVTY

SEQ ID NO: 10851 - protein, 18 aa, Artificial Sequence
  Cyclic GFR-binding peptide
  MOD_RES (5)..(5): Xaa is C or S
EGLEXVPTEESSLSMLFF

SEQ ID NO: 10852 - protein, 19 aa, Artificial Sequence
  Cyclic GFR-binding peptide
  MOD_RES (5)..(6): Xaa is C or S
VPKAXXAPTKLSSLSVLFF

SEQ ID NO: 10853 - protein, 15 aa, Artificial Sequence
  Cyclic GFR-binding peptide
SSLSILFFDSANNVV

SEQ ID NO: 10854 - protein, 15 aa, Artificial Sequence
  Cyclic GFR-binding peptide
  MOD_RES (1)..(2): Xaa is C or S
XXVSQDLSSLSILFF

SEQ ID NO: 10855 - protein, 19 aa, Artificial Sequence
  Cyclic GFR-binding peptide
EESSLSMLFFRIKPHQGQH

SEQ ID NO: 10856 - protein, 17 aa, Artificial Sequence
  Cyclic GFR-binding peptide
KLSSLSVLFFDDMGVPT

SEQ ID NO: 10857 - protein, 14 aa, Artificial Sequence
  Cyclic GFR-binding peptide
  MOD_RES (1)..(1): Xaa is C or S
XTPTKMSSLSMLFF

SEQ ID NO: 10858 - protein, 18 aa, Artificial Sequence
  Cyclic GFR-binding peptide
TELSSLSMLFFDEYDKVV

SEQ ID NO: 10859 - protein, 13 aa, Artificial Sequence
  Cyclic GFR-binding peptide
APVKTSSLSMLFF

SEQ ID NO: 10860 - protein, 26 aa, Artificial Sequence
  Cyclic GFR-binding peptide
  MOD_RES (6)..(7): Xaa is C or S
YVPKPXXAPTKLSSLSVLFFDDSSNV

SEQ ID NO: 10861 - protein, 18 aa, Artificial Sequence
  Cyclic GFR-binding peptide
ESSLSMLFFRIKPHQGQH

SEQ ID NO: 10862 - protein, 18 aa, Artificial Sequence
  Cyclic GFR-binding peptide
  MOD_RES (4)..(5): Xaa is C or S
PKAXXAPTKLSSLSVLFF

SEQ ID NO: 10863 - protein, 18 aa, Artificial Sequence
  Cyclic GFR-binding peptide
TQLSSLSVLFFDDSSNVI

SEQ ID NO: 10864 - protein, 22 aa, Artificial Sequence
  Cyclic GFR-binding peptide
  MOD_RES (6)..(7): Xaa is C or S
GSAGPXXTPTKMSSLSMLFFND

SEQ ID NO: 10865 - protein, 16 aa, Artificial Sequence
  Cyclic GFR-binding peptide
  MOD_RES (2)..(3): Xaa is C or S
TXXAPVKTSSLSMLFF

SEQ ID NO: 10866 - protein, 27 aa, Artificial Sequence
  Cyclic GFR-binding peptide
  MOD_RES (5)..(5): Xaa is C or S
SSVKXQPSRVHHSSLSVLFFEYVRKKP

SEQ ID NO: 10867 - protein, 18 aa, Artificial Sequence
  Cyclic GFR-binding peptide
TKLSSLSVLFFDSSNNVI

SEQ ID NO: 10868 - protein, 22 aa, Artificial Sequence
  Cyclic GFR-binding peptide
  MOD_RES (5)..(5): Xaa is C or S
SSVKXQPSRVHHSSLSVLFFEY

SEQ ID NO: 10869 - protein, 19 aa, Artificial Sequence
  Cyclic GFR-binding peptide
HHSSLSVLFFEYVRKKPKL

SEQ ID NO: 10870 - protein, 23 aa, Artificial Sequence
  Cyclic GFR-binding peptide
  MOD_RES (6)..(7): Xaa is C or S
YVPKPXXAPTKLSSLSVLFFDDS

SEQ ID NO: 10871 - protein, 24 aa, Artificial Sequence
  Cyclic GFR-binding peptide
  MOD_RES (6)..(7): Xaa is C or S
KVGKAXXVPTKLSSLSVLFFDDMG

SEQ ID NO: 10872 - protein, 20 aa, Artificial Sequence
  Cyclic GFR-binding peptide
  MOD_RES (6)..(7): Xaa is C or S
SIPKAXXVPTELSSLSMLFF

SEQ ID NO: 10873 - protein, 17 aa, Artificial Sequence
  Cyclic GFR-binding peptide
SSLSVLFFEYVRKKPKL

SEQ ID NO: 10874 - protein, 22 aa, Artificial Sequence
  Cyclic GFR-binding peptide
  MOD_RES (6)..(7): Xaa is C or S
ASASPXXVSQDLSSLSILFFIG

SEQ ID NO: 10875 - protein, 17 aa, Artificial Sequence
  Cyclic GFR-binding peptide
KMSSLSMLFFNDKQQII

SEQ ID NO: 10876 - protein, 22 aa, Artificial Sequence
  Cyclic GFR-binding peptide
  MOD_RES (6)..(7): Xaa is C or S
ASASPXXVPQDLSSLSILFFVG

SEQ ID NO: 10877 - protein, 19 aa, Artificial Sequence
  Cyclic GFR-binding peptide
PVKTSSLSMLFFDNGRVLL

SEQ ID NO: 10878 - protein, 18 aa, Artificial Sequence
  Cyclic GFR-binding peptide
QDLSSLSILFFVGRTPKV

SEQ ID NO: 10879 - protein, 25 aa, Artificial Sequence
  Cyclic GFR-binding peptide
  MOD_RES (7)..(7): Xaa is C or S
HVTKPTXAPTKLSSLSVLFFDDSSN

SEQ ID NO: 10880 - protein, 17 aa, Artificial Sequence
  Cyclic GFR-binding peptide
  MOD_RES (4)..(4): Xaa is C or S
GLEXVPTEESSLSMLFF

SEQ ID NO: 10881 - protein, 27 aa, Artificial Sequence
  Cyclic GFR-binding peptide
  MOD_RES (7)..(7): Xaa is C or S
NDEGLEXVPTEESSLSMLFFRIKPHQG

SEQ ID NO: 10882 - protein, 13 aa, Artificial Sequence
  Cyclic GFR-binding peptide
APTKLSSLSVLFF

SEQ ID NO: 10883 - protein, 21 aa, Artificial Sequence
  Cyclic GFR-binding peptide
RVHHSSLSVLFFEYVRKKPKL

SEQ ID NO: 10884 - protein, 18 aa, Artificial Sequence
  Cyclic GFR-binding peptide
TKLSSLSILFFDKGVVTY

SEQ ID NO: 10885 - protein, 22 aa, Artificial Sequence
  Cyclic GFR-binding peptide
  MOD_RES (6)..(7): Xaa is C or S
STPPTXXVPTRLSSLSILFFDS

SEQ ID NO: 10886 - protein, 16 aa, Artificial Sequence
  Cyclic GFR-binding peptide
  MOD_RES (2)..(3): Xaa is C or S
AXXVPTELSSLSMLFF

SEQ ID NO: 10887 - protein, 17 aa, Artificial Sequence
  Cyclic GFR-binding peptide
QLSSLSVLFFDDSSNVI

SEQ ID NO: 10888 - protein, 27 aa, Artificial Sequence
  Cyclic GFR-binding peptide
  MOD_RES (6)..(7): Xaa is C or S
AAPASXXVPARLSSLSILFFDAANNVV

SEQ ID NO: 10889 - protein, 18 aa, Artificial Sequence
  Cyclic GFR-binding peptide
  MOD_RES (4)..(5): Xaa is C or S
PKPXXAPTQLSSLSVLFF

SEQ ID NO: 10890 - protein, 23 aa, Artificial Sequence
  Cyclic GFR-binding peptide
  MOD_RES (6)..(7): Xaa is C or S
AAPASXXVPARLSSLSILFFDAA

SEQ ID NO: 10891 - protein, 27 aa, Artificial Sequence
  Cyclic GFR-binding peptide
  MOD_RES (6)..(7): Xaa is C or S
RVPSTXXAPVKTSSLSMLFFDNGRVLL

SEQ ID NO: 10892 - protein, 21 aa, Artificial Sequence
  Cyclic GFR-binding peptide
  MOD_RES (6)..(7): Xaa is C or S
STPPTXXVPTRLSSLSILFFD

SEQ ID NO: 10893 - protein, 27 aa, Artificial Sequence
  Cyclic GFR-binding peptide
  MOD_RES (6)..(7): Xaa is C or S
TVPKPXXAPTQLSSLSVLFFDDSSNVI

SEQ ID NO: 10894 - protein, 26 aa, Artificial Sequence
  Cyclic GFR-binding peptide
  MOD_RES (6)..(7): Xaa is C or S
KASKAXXVPTKLSSLSILFFDKGVVT

SEQ ID NO: 10895 - protein, 15 aa, Artificial Sequence
  Cyclic GFR-binding peptide
  MOD_RES (1)..(2): Xaa is C or S
XXVPTRLSSLSILFF

SEQ ID NO: 10896 - protein, 19 aa, Artificial Sequence
  Cyclic GFR-binding peptide
PQALSSLSILFFVGRKPKV

SEQ ID NO: 10897 - protein, 20 aa, Artificial Sequence
  Cyclic GFR-binding peptide
VHHSSLSVLFFEYVRKKPKL

SEQ ID NO: 10898 - protein, 16 aa, Artificial Sequence
  Cyclic GFR-binding peptide
  MOD_RES (2)..(3): Xaa is C or S
SXXVPARLSSLSILFF

SEQ ID NO: 10899 - protein, 14 aa, Artificial Sequence
  Cyclic GFR-binding peptide
  MOD_RES (1)..(1): Xaa is C or S
XVPQDLSSLSILFF

SEQ ID NO: 10900 - protein, 17 aa, Artificial Sequence
  Cyclic GFR-binding peptide
KLSSLSVLFFDDSSNVI

SEQ ID NO: 10901 - protein, 19 aa, Artificial Sequence
  Cyclic GFR-binding peptide
  MOD_RES (5)..(6): Xaa is C or S
VPKPXXAPTQLSSLSVLFF

SEQ ID NO: 10902 - protein, 14 aa, Artificial Sequence
  Cyclic GFR-binding peptide
  MOD_RES (1)..(1): Xaa is C or S
XVPTELSSLSMLFF

SEQ ID NO: 10903 - protein, 14 aa, Artificial Sequence
  Cyclic GFR-binding peptide
  MOD_RES (1)..(1): Xaa is C or S
XAPTQLSSLSVLFF

SEQ ID NO: 10904 - protein, 14 aa, Artificial Sequence
  Cyclic GFR-binding peptide
  MOD_RES (1)..(1): Xaa is C or S
XVPQALSSLSILFF

SEQ ID NO: 10905 - protein, 16 aa, Artificial Sequence
  Cyclic GFR-binding peptide
  MOD_RES (3)..(3): Xaa is C or S
LEXVPTEESSLSMLFF

SEQ ID NO: 10906 - protein, 15 aa, Artificial Sequence
  Cyclic GFR-binding peptide
  MOD_RES (1)..(2): Xaa is C or S
XXAPVKTSSLSMLFF

SEQ ID NO: 10907 - protein, 14 aa, Artificial Sequence
  Cyclic GFR-binding peptide
PSRVHHSSLSVLFF

SEQ ID NO: 10908 - protein, 19 aa, Artificial Sequence
  Cyclic GFR-binding peptide
  MOD_RES (5)..(6): Xaa is C or S
SASPXXVPQDLSSLSILFF

SEQ ID NO: 10909 - protein, 16 aa, Artificial Sequence
  Cyclic GFR-binding peptide
  MOD_RES (2)..(3): Xaa is C or S
PXXVSQDLSSLSILFF

SEQ ID NO: 10910 - protein, 24 aa, Artificial Sequence
  Cyclic GFR-binding peptide
  MOD_RES (6)..(7): Xaa is C or S
YVPKPXXAPTKLSSLSVLFFDDSS

SEQ ID NO: 10911 - protein, 24 aa, Artificial Sequence
  Cyclic GFR-binding peptide
  MOD_RES (6)..(7): Xaa is C or S
RVPSTXXAPVKTSSLSMLFFDNGR

SEQ ID NO: 10912 - protein, 15 aa, Artificial Sequence
  Cyclic GFR-binding peptide
QPSRVHHSSLSVLFF

SEQ ID NO: 10913 - protein, 15 aa, Artificial Sequence
  Cyclic GFR-binding peptide
SSLSILFFVGRTPKV

SEQ ID NO: 10914 - protein, 25 aa, Artificial Sequence
  Cyclic GFR-binding peptide
  MOD_RES (6)..(7): Xaa is C or S
ASASPXXVSQDLSSLSILFFIGKTP

SEQ ID NO: 10915 - protein, 14 aa, Artificial Sequence
  Cyclic GFR-binding peptide
  MOD_RES (1)..(1): Xaa is C or S
XVPTKLSSLSILFF

SEQ ID NO: 10916 - protein, 17 aa, Artificial Sequence
  Cyclic GFR-binding peptide
ELSSLSMLFFDEYDKVV

SEQ ID NO: 10917 - protein, 21 aa, Artificial Sequence
  Cyclic GFR-binding peptide
  MOD_RES (6)..(7): Xaa is C or S
YVPKPXXAPTKLSSLSVLFFD

SEQ ID NO: 10918 - protein, 13 aa, Artificial Sequence
  Cyclic GFR-binding peptide
VPTKLSSLSVLFF

SEQ ID NO: 10919 - protein, 24 aa, Artificial Sequence
  Cyclic GFR-binding peptide
  MOD_RES (6)..(7): Xaa is C or S
KASKAXXVPTKLSSLSILFFDKGV

SEQ ID NO: 10920 - protein, 24 aa, Artificial Sequence
  Cyclic GFR-binding peptide
  MOD_RES (6)..(7): Xaa is C or S
AVPKAXXAPTKLSSLSVLFFDSSN

SEQ ID NO: 10921 - protein, 25 aa, Artificial Sequence
  Cyclic GFR-binding peptide
  MOD_RES (6)..(7): Xaa is C or S
KASKAXXVPTKLSSLSILFFDKGVV

SEQ ID NO: 10922 - protein, 20 aa, Artificial Sequence
  Cyclic GFR-binding peptide
TEESSLSMLFFRIKPHQGQH

SEQ ID NO: 10923 - protein, 19 aa, Artificial Sequence
  Cyclic GFR-binding peptide
PTRLSSLSILFFDSANNVV

SEQ ID NO: 10924 - protein, 18 aa, Artificial Sequence
  Cyclic GFR-binding peptide
  MOD_RES (4)..(5): Xaa is C or S
AAPXXVPQALSSLSILFF

SEQ ID NO: 10925 - protein, 28 aa, Artificial Sequence
  Cyclic GFR-binding peptide
  MOD_RES (7)..(7): Xaa is C or S
NDEGLEXVPTEESSLSMLFFRIKPHQGQ

SEQ ID NO: 10926 - protein, 19 aa, Artificial Sequence
  Cyclic GFR-binding peptide
PTELSSLSMLFFDENEKVV

SEQ ID NO: 10927 - protein, 19 aa, Artificial Sequence
  Cyclic GFR-binding peptide
PARLSSLSILFFDAANNVV

SEQ ID NO: 10928 - protein, 22 aa, Artificial Sequence
  Cyclic GFR-binding peptide
  MOD_RES (6)..(7): Xaa is C or S
AAPASXXVPARLSSLSILFFDA

SEQ ID NO: 10929 - protein, 25 aa, Artificial Sequence
  Cyclic GFR-binding peptide
  MOD_RES (6)..(7): Xaa is C or S
AAPASXXVPARLSSLSILFFDAANN

SEQ ID NO: 10930 - protein, 18 aa, Artificial Sequence
  Cyclic GFR-binding peptide
  MOD_RES (4)..(5): Xaa is C or S
PSTXXAPVKTSSLSMLFF

SEQ ID NO: 10931 - protein, 24 aa, Artificial Sequence
  Cyclic GFR-binding peptide
  MOD_RES (7)..(7): Xaa is C or S
HVTKPTXAPTKLSSLSVLFFDDSS

SEQ ID NO: 10932 - protein, 26 aa, Artificial Sequence
  Cyclic GFR-binding peptide
  MOD_RES (7)..(7): Xaa is C or S
HVTKPTXAPTKLSSLSVLFFDDSSNV

SEQ ID NO: 10933 - protein, 24 aa, Artificial Sequence
  Cyclic GFR-binding peptide
  MOD_RES (6)..(7): Xaa is C or S
ASASPXXVPQDLSSLSILFFVGRT

SEQ ID NO: 10934 - protein, 16 aa, Artificial Sequence
  Cyclic GFR-binding peptide
  MOD_RES (2)..(3): Xaa is C or S
AXXVPTKLSSLSVLFF

SEQ ID NO: 10935 - protein, 16 aa, Artificial Sequence
  Cyclic GFR-binding peptide
LSSLSILFFVGRKPKV

SEQ ID NO: 10936 - protein, 22 aa, Artificial Sequence
  Cyclic GFR-binding peptide
  MOD_RES (6)..(7): Xaa is C or S
KVGKAXXVPTKLSSLSVLFFDD

SEQ ID NO: 10937 - protein, 16 aa, Artificial Sequence
  Cyclic GFR-binding peptide
  MOD_RES (2)..(3): Xaa is C or S
PXXAPTKLSSLSVLFF

SEQ ID NO: 10938 - protein, 16 aa, Artificial Sequence
  Cyclic GFR-binding peptide
  MOD_RES (2)..(3): Xaa is C or S
PXXAPTQLSSLSVLFF

SEQ ID NO: 10939 - protein, 20 aa, Artificial Sequence
  Cyclic GFR-binding peptide
  MOD_RES (6)..(7): Xaa is C or S
KVGKAXXVPTKLSSLSVLFF

SEQ ID NO: 10940 - protein, 18 aa, Artificial Sequence
  Cyclic GFR-binding peptide
  MOD_RES (4)..(5): Xaa is C or S
ASPXXVSQDLSSLSILFF

SEQ ID NO: 10941 - protein, 16 aa, Artificial Sequence
  Cyclic GFR-binding peptide
  MOD_RES (1)..(1): Xaa is C or S
XQPSRVHHSSLSVLFF

SEQ ID NO: 10942 - protein, 23 aa, Artificial Sequence
  Cyclic GFR-binding peptide
  MOD_RES (6)..(7): Xaa is C or S
AVPKAXXAPTKLSSLSVLFFDSS

SEQ ID NO: 10943 - protein, 14 aa, Artificial Sequence
  Cyclic GFR-binding peptide
  MOD_RES (1)..(1): Xaa is C or S
XVPTKLSSLSVLFF

SEQ ID NO: 10944 - protein, 15 aa, Artificial Sequence
  Cyclic GFR-binding peptide
SSLSVLFFDDMGVPT

SEQ ID NO: 10945 - protein, 19 aa, Artificial Sequence
  Cyclic GFR-binding peptide
PTKMSSLSMLFFNDKQQII

SEQ ID NO: 10946 - protein, 25 aa, Artificial Sequence
  Cyclic GFR-binding peptide
  MOD_RES (6)..(7): Xaa is C or S
YVPKPXXAPTKLSSLSVLFFDDSSN

SEQ ID NO: 10947 - protein, 23 aa, Artificial Sequence
  Cyclic GFR-binding peptide
  MOD_RES (6)..(7): Xaa is C or S
RVPSTXXAPVKTSSLSMLFFDNG

SEQ ID NO: 10948 - protein, 17 aa, Artificial Sequence
  Cyclic GFR-binding peptide
  MOD_RES (3)..(4): Xaa is C or S
SPXXVSQDLSSLSILFF

SEQ ID NO: 10949 - protein, 15 aa, Artificial Sequence
  Cyclic GFR-binding peptide
  MOD_RES (1)..(2): Xaa is C or S
XXVPQALSSLSILFF

SEQ ID NO: 10950 - protein, 16 aa, Artificial Sequence
  Cyclic GFR-binding peptide
LSSLSILFFIGKTPKI

SEQ ID NO: 10951 - protein, 27 aa, Artificial Sequence
  Cyclic GFR-binding peptide
  MOD_RES (6)..(7): Xaa is C or S
KVGKAXXVPTKLSSLSVLFFDDMGVPT

SEQ ID NO: 10952 - protein, 27 aa, Artificial Sequence
  Cyclic GFR-binding peptide
  MOD_RES (6)..(7): Xaa is C or S
ASASPXXVPQDLSSLSILFFVGRTPKV

SEQ ID NO: 10953 - protein, 15 aa, Artificial Sequence
  Cyclic GFR-binding peptide
SSLSILFFIGKTPKI

SEQ ID NO: 10954 - protein, 18 aa, Artificial Sequence
  Cyclic GFR-binding peptide
  MOD_RES (3)..(3): Xaa is C or S
VKXQPSRVHHSSLSVLFF

SEQ ID NO: 10955 - protein, 22 aa, Artificial Sequence
  Cyclic GFR-binding peptide
  MOD_RES (6)..(7): Xaa is C or S
KIPKAXXVPTELSSLSMLFFDE

SEQ ID NO: 10956 - protein, 16 aa, Artificial Sequence
  Cyclic GFR-binding peptide
MSSLSMLFFNDKQQII

SEQ ID NO: 10957 - protein, 23 aa, Artificial Sequence
  Cyclic GFR-binding peptide
  MOD_RES (7)..(7): Xaa is C or S
NDEGLEXVPTEESSLSMLFFRIK

SEQ ID NO: 10958 - protein, 19 aa, Artificial Sequence
  Cyclic GFR-binding peptide
  MOD_RES (5)..(6): Xaa is C or S
SAAPXXVPQALSSLSILFF

SEQ ID NO: 10959 - protein, 27 aa, Artificial Sequence
  Cyclic GFR-binding peptide
  MOD_RES (6)..(7): Xaa is C or S
HVPKPXXAPTKLSSLSVLFFDDSSNVI

SEQ ID NO: 10960 - protein, 23 aa, Artificial Sequence
  Cyclic GFR-binding peptide
  MOD_RES (6)..(7): Xaa is C or S
ASASPXXVSQDLSSLSILFFIGK

SEQ ID NO: 10961 - protein, 22 aa, Artificial Sequence
  Cyclic GFR-binding peptide
  MOD_RES (6)..(7): Xaa is C or S
YVPKPXXAPTKLSSLSVLFFDD

SEQ ID NO: 10962 - protein, 17 aa, Artificial Sequence
  Cyclic GFR-binding peptide
  MOD_RES (3)..(4): Xaa is C or S
PTXXVPTRLSSLSILFF

SEQ ID NO: 10963 - protein, 26 aa, Artificial Sequence
  Cyclic GFR-binding peptide
  MOD_RES (6)..(7): Xaa is C or S
RVPSTXXAPVKTSSLSMLFFDNGRVL

SEQ ID NO: 10964 - protein, 17 aa, Artificial Sequence
  Cyclic GFR-binding peptide
  MOD_RES (3)..(4): Xaa is C or S
STXXAPVKTSSLSMLFF

SEQ ID NO: 10965 - protein, 29 aa, Artificial Sequence
  Cyclic GFR-binding peptide
  MOD_RES (7)..(7): Xaa is C or S
NDEGLEXVPTEESSLSMLFFRIKPHQGQH

SEQ ID NO: 10966 - protein, 27 aa, Artificial Sequence
  Cyclic GFR-binding peptide
  MOD_RES (6)..(7): Xaa is C or S
AVPKAXXAPTKLSSLSVLFFDSSNNVI

SEQ ID NO: 10967 - protein, 26 aa, Artificial Sequence
  Cyclic GFR-binding peptide
  MOD_RES (5)..(5): Xaa is C or S
SSVKXQPSRVHHSSLSVLFFEYVRKK

SEQ ID NO: 10968 - protein, 26 aa, Artificial Sequence
  Cyclic GFR-binding peptide
  MOD_RES (6)..(7): Xaa is C or S
STPPTXXVPTRLSSLSILFFDSANNV

SEQ ID NO: 10969 - protein, 21 aa, Artificial Sequence
  Cyclic GFR-binding peptide
  MOD_RES (6)..(7): Xaa is C or S
HVPKPXXAPTKLSSLSVLFFD

SEQ ID NO: 10970 - protein, 15 aa, Artificial Sequence
  Cyclic GFR-binding peptide
SSLSILFFDAANNVV

SEQ ID NO: 10971 - protein, 15 aa, Artificial Sequence
  Cyclic GFR-binding peptide
  MOD_RES (1)..(2): Xaa is C or S
XXAPTKLSSLSVLFF

SEQ ID NO: 10972 - protein, 17 aa, Artificial Sequence
  Cyclic GFR-binding peptide
DLSSLSILFFVGRTPKV

SEQ ID NO: 10973 - protein, 14 aa, Artificial Sequence
  Cyclic GFR-binding peptide
  MOD_RES (1)..(1): Xaa is C or S
XVSQDLSSLSILFF

SEQ ID NO: 10974 - protein, 19 aa, Artificial Sequence
  Cyclic GFR-binding peptide
  MOD_RES (5)..(6): Xaa is C or S
APASXXVPARLSSLSILFF

SEQ ID NO: 10975 - protein, 18 aa, Artificial Sequence
  Cyclic GFR-binding peptide
TKMSSLSMLFFNDKQQII

SEQ ID NO: 10976 - protein, 13 aa, Artificial Sequence
  Cyclic GFR-binding peptide
VPTELSSLSMLFF

SEQ ID NO: 10977 - protein, 22 aa, Artificial Sequence
  Cyclic GFR-binding peptide
  MOD_RES (7)..(7): Xaa is C or S
NDEGLEXVPTEESSLSMLFFRI

SEQ ID NO: 10978 - protein, 27 aa, Artificial Sequence
  Cyclic GFR-binding peptide
  MOD_RES (6)..(7): Xaa is C or S
KIPKAXXVPTELSSLSMLFFDENEKVV

SEQ ID NO: 10979 - protein, 25 aa, Artificial Sequence
  Cyclic GFR-binding peptide
  MOD_RES (6)..(7): Xaa is C or S
TVPKPXXAPTQLSSLSVLFFDDSSN

SEQ ID NO: 10980 - protein, 15 aa, Artificial Sequence
  Cyclic GFR-binding peptide
SSLSMLFFDNGRVLL

SEQ ID NO: 10981 - protein, 24 aa, Artificial Sequence
  Cyclic GFR-binding peptide
  MOD_RES (6)..(7): Xaa is C or S
SIPKAXXVPTELSSLSMLFFDEYD

SEQ ID NO: 10982 - protein, 18 aa, Artificial Sequence
  Cyclic GFR-binding peptide
  MOD_RES (4)..(5): Xaa is C or S
PKPXXAPTKLSSLSVLFF

SEQ ID NO: 10983 - protein, 21 aa, Artificial Sequence
  Cyclic GFR-binding peptide
  MOD_RES (6)..(7): Xaa is C or S
AAPASXXVPARLSSLSILFFD

SEQ ID NO: 10984 - protein, 21 aa, Artificial Sequence
  Cyclic GFR-binding peptide
  MOD_RES (6)..(7): Xaa is C or S
ASASPXXVSQDLSSLSILFFI

SEQ ID NO: 10985 - protein, 23 aa, Artificial Sequence
  Cyclic GFR-binding peptide
  MOD_RES (6)..(7): Xaa is C or S
TVPKPXXAPTQLSSLSVLFFDDS

SEQ ID NO: 10986 - protein, 22 aa, Artificial Sequence
  Cyclic GFR-binding peptide
  MOD_RES (7)..(7): Xaa is C or S
HVTKPTXAPTKLSSLSVLFFDD

SEQ ID NO: 10987 - protein, 14 aa, Artificial Sequence
  Cyclic GFR-binding peptide
  MOD_RES (1)..(1): Xaa is C or S
XVPARLSSLSILFF

SEQ ID NO: 10988 - protein, 21 aa, Artificial Sequence
  Cyclic GFR-binding peptide
  MOD_RES (6)..(7): Xaa is C or S
KASKAXXVPTKLSSLSILFFD

SEQ ID NO: 10989 - protein, 23 aa, Artificial Sequence
  Cyclic GFR-binding peptide
  MOD_RES (6)..(7): Xaa is C or S
STPPTXXVPTRLSSLSILFFDSA

SEQ ID NO: 10990 - protein, 26 aa, Artificial Sequence
  Cyclic GFR-binding peptide
  MOD_RES (6)..(7): Xaa is C or S
AAPASXXVPARLSSLSILFFDAANNV

SEQ ID NO: 10991 - protein, 19 aa, Artificial Sequence
  Cyclic GFR-binding peptide
  MOD_RES (4)..(4): Xaa is C or S
SVKXQPSRVHHSSLSVLFF

SEQ ID NO: 10992 - protein, 19 aa, Artificial Sequence
  Cyclic GFR-binding peptide
  MOD_RES (5)..(6): Xaa is C or S
SAGPXXTPTKMSSLSMLFF

SEQ ID NO: 10993 - protein, 17 aa, Artificial Sequence
  Cyclic GFR-binding peptide
RLSSLSILFFDSANNVV

SEQ ID NO: 10994 - protein, 20 aa, Artificial Sequence
  Cyclic GFR-binding peptide
  MOD_RES (6)..(7): Xaa is C or S
ASASPXXVPQDLSSLSILFF

SEQ ID NO: 10995 - protein, 17 aa, Artificial Sequence
  Cyclic GFR-binding peptide
  MOD_RES (3)..(4): Xaa is C or S
KPXXAPTKLSSLSVLFF

SEQ ID NO: 10996 - protein, 17 aa, Artificial Sequence
  Cyclic GFR-binding peptide
  MOD_RES (3)..(4): Xaa is C or S
KAXXVPTKLSSLSILFF

SEQ ID NO: 10997 - protein, 13 aa, Artificial Sequence
  Cyclic GFR-binding peptide
VPQDLSSLSILFF

SEQ ID NO: 10998 - protein, 20 aa, Artificial Sequence
  Cyclic GFR-binding peptide
  MOD_RES (6)..(7): Xaa is C or S
AAPASXXVPARLSSLSILFF

SEQ ID NO: 10999 - protein, 15 aa, Artificial Sequence
  Cyclic GFR-binding peptide
SSLSMLFFDEYDKVV

SEQ ID NO: 11000 - protein, 21 aa, Artificial Sequence
  Cyclic GFR-binding peptide
  MOD_RES (6)..(7): Xaa is C or S
ASAAPXXVPQALSSLSILFFV

SEQ ID NO: 11001 - protein, 20 aa, Artificial Sequence
  Cyclic GFR-binding peptide
  MOD_RES (7)..(7): Xaa is C or S
HVTKPTXAPTKLSSLSVLFF

SEQ ID NO: 11002 - protein, 24 aa, Artificial Sequence
  Cyclic GFR-binding peptide
  MOD_RES (6)..(7): Xaa is C or S
STPPTXXVPTRLSSLSILFFDSAN

SEQ ID NO: 11003 - protein, 24 aa, Artificial Sequence
  Cyclic GFR-binding peptide
  MOD_RES (6)..(7): Xaa is C or S
ASAAPXXVPQALSSLSILFFVGRK

SEQ ID NO: 11004 - protein, 17 aa, Artificial Sequence
  Cyclic GFR-binding peptide
RLSSLSILFFDAANNVV

SEQ ID NO: 11005 - protein, 15 aa, Artificial Sequence
  Cyclic GFR-binding peptide
SSLSILFFVGRKPKV

SEQ ID NO: 11006 - protein, 15 aa, Artificial Sequence
  Cyclic GFR-binding peptide
SSLSVLFFDDSSNVI

SEQ ID NO: 11007 - protein, 29 aa, Artificial Sequence
  Cyclic GFR-binding peptide
  MOD_RES (5)..(5): Xaa is C or S
SSVKXQPSRVHHSSLSVLFFEYVRKKPKL

SEQ ID NO: 11008 - protein, 18 aa, Artificial Sequence
  Cyclic GFR-binding peptide
VKTSSLSMLFFDNGRVLL

SEQ ID NO: 11009 - protein, 20 aa, Artificial Sequence
  Cyclic GFR-binding peptide
  MOD_RES (5)..(5): Xaa is C or S
SSVKXQPSRVHHSSLSVLFF

SEQ ID NO: 11010 - protein, 15 aa, Artificial Sequence
  Cyclic GFR-binding peptide
  MOD_RES (1)..(2): Xaa is C or S
XXVPQDLSSLSILFF

SEQ ID NO: 11011 - protein, 23 aa, Artificial Sequence
  Cyclic GFR-binding peptide
  MOD_RES (6)..(7): Xaa is C or S
ASASPXXVPQDLSSLSILFFVGR

SEQ ID NO: 11012 - protein, 27 aa, Artificial Sequence
  Cyclic GFR-binding peptide
  MOD_RES (6)..(7): Xaa is C or S
ASASPXXVSQDLSSLSILFFIGKTPKI

SEQ ID NO: 11013 - protein, 25 aa, Artificial Sequence
  Cyclic GFR-binding peptide
  MOD_RES (6)..(7): Xaa is C or S
SIPKAXXVPTELSSLSMLFFDEYDK

SEQ ID NO: 11014 - protein, 16 aa, Artificial Sequence
  Cyclic GFR-binding peptide
LSSLSVLFFDSSNNVI

SEQ ID NO: 11015 - protein, 26 aa, Artificial Sequence
  Cyclic GFR-binding peptide
  MOD_RES (6)..(7): Xaa is C or S
TVPKPXXAPTQLSSLSVLFFDDSSNV

SEQ ID NO: 11016 - protein, 26 aa, Artificial Sequence
  Cyclic GFR-binding peptide
  MOD_RES (6)..(7): Xaa is C or S
ASASPXXVPQDLSSLSILFFVGRTPK

SEQ ID NO: 11017 - protein, 17 aa, Artificial Sequence
  Cyclic GFR-binding peptide
ALSSLSILFFVGRKPKV

SEQ ID NO: 11018 - protein, 19 aa, Artificial Sequence
  Cyclic GFR-binding peptide
PTKLSSLSVLFFDDSSNVI

SEQ ID NO: 11019 - protein, 18 aa, Artificial Sequence
  Cyclic GFR-binding peptide
TRLSSLSILFFDSANNVV

SEQ ID NO: 11020 - protein, 16 aa, Artificial Sequence
  Cyclic GFR-binding peptide
LSSLSILFFDKGVVTY

SEQ ID NO: 11021 - protein, 21 aa, Artificial Sequence
  Cyclic GFR-binding peptide
  MOD_RES (6)..(7): Xaa is C or S
AVPKAXXAPTKLSSLSVLFFD

SEQ ID NO: 11022 - protein, 20 aa, Artificial Sequence
  Cyclic GFR-binding peptide
  MOD_RES (6)..(7): Xaa is C or S
STPPTXXVPTRLSSLSILFF

SEQ ID NO: 11023 - protein, 18 aa, Artificial Sequence
  Cyclic GFR-binding peptide
ARLSSLSILFFDAANNVV

SEQ ID NO: 11024 - protein, 25 aa, Artificial Sequence
  Cyclic GFR-binding peptide
  MOD_RES (6)..(7): Xaa is C or S
GSAGPXXTPTKMSSLSMLFFNDKQQ

SEQ ID NO: 11025 - protein, 19 aa, Artificial Sequence
  Cyclic GFR-binding peptide
  MOD_RES (5)..(6): Xaa is C or S
VGKAXXVPTKLSSLSVLFF

SEQ ID NO: 11026 - protein, 23 aa, Artificial Sequence
  Cyclic GFR-binding peptide
  MOD_RES (6)..(7): Xaa is C or S
KIPKAXXVPTELSSLSMLFFDEN

SEQ ID NO: 11027 - protein, 18 aa, Artificial Sequence
  Cyclic GFR-binding peptide
  MOD_RES (5)..(5): Xaa is C or S
TKPTXAPTKLSSLSVLFF

SEQ ID NO: 11028 - protein, 25 aa, Artificial Sequence
  Cyclic GFR-binding peptide
  MOD_RES (6)..(7): Xaa is C or S
ASAAPXXVPQALSSLSILFFVGRKP

SEQ ID NO: 11029 - protein, 20 aa, Artificial Sequence
  Cyclic GFR-binding peptide
  MOD_RES (7)..(7): Xaa is C or S
NDEGLEXVPTEESSLSMLFF

SEQ ID NO: 11030 - protein, 19 aa, Artificial Sequence
  Cyclic GFR-binding peptide
PQDLSSLSILFFVGRTPKV

SEQ ID NO: 11031 - protein, 19 aa, Artificial Sequence
  Cyclic GFR-binding peptide
PTELSSLSMLFFDEYDKVV

SEQ ID NO: 11032 - protein, 17 aa, Artificial Sequence
  Cyclic GFR-binding peptide
  MOD_RES (2)..(2): Xaa is C or S
KXQPSRVHHSSLSVLFF

SEQ ID NO: 11033 - protein, 26 aa, Artificial Sequence
  Cyclic GFR-binding peptide
  MOD_RES (6)..(7): Xaa is C or S
GSAGPXXTPTKMSSLSMLFFNDKQQI

SEQ ID NO: 11034 - protein, 13 aa, Artificial Sequence
  Cyclic GFR-binding peptide
VPQALSSLSILFF

SEQ ID NO: 11035 - protein, 22 aa, Artificial Sequence
  Cyclic GFR-binding peptide
  MOD_RES (6)..(7): Xaa is C or S
TVPKPXXAPTQLSSLSVLFFDD

SEQ ID NO: 11036 - protein, 19 aa, Artificial Sequence
  Cyclic GFR-binding peptide
PTKLSSLSILFFDKGVVTY

SEQ ID NO: 11037 - protein, 25 aa, Artificial Sequence
  Cyclic GFR-binding peptide
  MOD_RES (6)..(7): Xaa is C or S
RVPSTXXAPVKTSSLSMLFFDNGRV

SEQ ID NO: 11038 - protein, 19 aa, Artificial Sequence
  Cyclic GFR-binding peptide
PTQLSSLSVLFFDDSSNVI

SEQ ID NO: 11039 - protein, 16 aa, Artificial Sequence
  Cyclic GFR-binding peptide
  MOD_RES (2)..(3): Xaa is C or S
PXXVPQDLSSLSILFF

SEQ ID NO: 11040 - protein, 16 aa, Artificial Sequence
  Cyclic GFR-binding peptide
TSSLSMLFFDNGRVLL

SEQ ID NO: 11041 - protein, 15 aa, Artificial Sequence
  Cyclic GFR-binding peptide
SSLSMLFFDENEKVV

SEQ ID NO: 11042 - protein, 17 aa, Artificial Sequence
  Cyclic GFR-binding peptide
SSLSMLFFRIKPHQGQH

SEQ ID NO: 11043 - protein, 15 aa, Artificial Sequence
  Cyclic GFR-binding peptide
  MOD_RES (1)..(2): Xaa is C or S
XXVPARLSSLSILFF

SEQ ID NO: 11044 - protein, 22 aa, Artificial Sequence
  Cyclic GFR-binding peptide
  MOD_RES (6)..(7): Xaa is C or S
ASAAPXXVPQALSSLSILFFVG

SEQ ID NO: 11045 - protein, 18 aa, Artificial Sequence
  Cyclic GFR-binding peptide
  MOD_RES (4)..(5): Xaa is C or S
AGPXXTPTKMSSLSMLFF

SEQ ID NO: 11046 - protein, 19 aa, Artificial Sequence
  Cyclic GFR-binding peptide
PTKLSSLSVLFFDSSNNVI

SEQ ID NO: 11047 - protein, 13 aa, Artificial Sequence
  Cyclic GFR-binding peptide
VPTKLSSLSILFF

SEQ ID NO: 11048 - protein, 26 aa, Artificial Sequence
  Cyclic GFR-binding peptide
  MOD_RES (7)..(7): Xaa is C or S
NDEGLEXVPTEESSLSMLFFRIKPHQ

SEQ ID NO: 11049 - protein, 21 aa, Artificial Sequence
  Cyclic GFR-binding peptide
  MOD_RES (6)..(7): Xaa is C or S
KIPKAXXVPTELSSLSMLFFD

SEQ ID NO: 11050 - protein, 15 aa, Artificial Sequence
  Cyclic GFR-binding peptide
  MOD_RES (1)..(2): Xaa is C or S
XXVPTELSSLSMLFF

SEQ ID NO: 11051 - protein, 25 aa, Artificial Sequence
  Cyclic GFR-binding peptide
  MOD_RES (6)..(7): Xaa is C or S
HVPKPXXAPTKLSSLSVLFFDDSSN

SEQ ID NO: 11052 - protein, 18 aa, Artificial Sequence
  Cyclic GFR-binding peptide
QDLSSLSILFFIGKTPKI

SEQ ID NO: 11053 - protein, 16 aa, Artificial Sequence
  Cyclic GFR-binding peptide
  MOD_RES (2)..(3): Xaa is C or S
PXXTPTKMSSLSMLFF

SEQ ID NO: 11054 - protein, 16 aa, Artificial Sequence
  Cyclic GFR-binding peptide
LSSLSMLFFDEYDKVV

SEQ ID NO: 11055 - protein, 13 aa, Artificial Sequence
  Cyclic GFR-binding peptide
APTQLSSLSVLFF

SEQ ID NO: 11056 - protein, 18 aa, Artificial Sequence
  Cyclic GFR-binding peptide
  MOD_RES (4)..(5): Xaa is C or S
PPTXXVPTRLSSLSILFF

SEQ ID NO: 11057 - protein, 26 aa, Artificial Sequence
  Cyclic GFR-binding peptide
  MOD_RES (6)..(7): Xaa is C or S
KVGKAXXVPTKLSSLSVLFFDDMGVP

SEQ ID NO: 11058 - protein, 16 aa, Artificial Sequence
  Cyclic GFR-binding peptide
  MOD_RES (3)..(3): Xaa is C or S
PTXAPTKLSSLSVLFF

SEQ ID NO: 11059 - protein, 19 aa, Artificial Sequence
  Cyclic GFR-binding peptide
PTKLSSLSVLFFDDMGVPT

SEQ ID NO: 11060 - protein, 15 aa, Artificial Sequence
  Cyclic GFR-binding peptide
  MOD_RES (1)..(2): Xaa is C or S
XXVPTKLSSLSVLFF

SEQ ID NO: 11061 - protein, 20 aa, Artificial Sequence
  Cyclic GFR-binding peptide
  MOD_RES (6)..(7): Xaa is C or S
GSAGPXXTPTKMSSLSMLFF

SEQ ID NO: 11062 - protein, 26 aa, Artificial Sequence
  Cyclic GFR-binding peptide
  MOD_RES (6)..(7): Xaa is C or S
ASASPXXVSQDLSSLSILFFIGKTPK

SEQ ID NO: 11063 - protein, 22 aa, Artificial Sequence
  Cyclic GFR-binding peptide
  MOD_RES (6)..(7): Xaa is C or S
KASKAXXVPTKLSSLSILFFDK

SEQ ID NO: 11064 - protein, 13 aa, Artificial Sequence
  Cyclic GFR-binding peptide
SRVHHSSLSVLFF

SEQ ID NO: 11065 - protein, 18 aa, Artificial Sequence
  Cyclic GFR-binding peptide
  MOD_RES (4)..(5): Xaa is C or S
SKAXXVPTKLSSLSILFF

SEQ ID NO: 11066 - protein, 25 aa, Artificial Sequence
  Cyclic GFR-binding peptide
  MOD_RES (5)..(5): Xaa is C or S
SSVKXQPSRVHHSSLSVLFFEYVRK

SEQ ID NO: 11067 - protein, 16 aa, Artificial Sequence
  Cyclic GFR-binding peptide
  MOD_RES (2)..(3): Xaa is C or S
AXXVPTKLSSLSILFF

SEQ ID NO: 11068 - protein, 17 aa, Artificial Sequence
  Cyclic GFR-binding peptide
  MOD_RES (3)..(4): Xaa is C or S
KPXXAPTQLSSLSVLFF

SEQ ID NO: 11069 - protein, 17 aa, Artificial Sequence
  Cyclic GFR-binding peptide
  MOD_RES (3)..(4): Xaa is C or S
KAXXAPTKLSSLSVLFF

SEQ ID NO: 11070 - protein, 26 aa, Artificial Sequence
  Cyclic GFR-binding peptide
  MOD_RES (6)..(7): Xaa is C or S
AVPKAXXAPTKLSSLSVLFFDSSNNV

SEQ ID NO: 11071 - protein, 23 aa, Artificial Sequence
  Cyclic GFR-binding peptide
  MOD_RES (7)..(7): Xaa is C or S
HVTKPTXAPTKLSSLSVLFFDDS

SEQ ID NO: 11072 - protein, 13 aa, Artificial Sequence
  Cyclic GFR-binding peptide
VPTRLSSLSILFF

SEQ ID NO: 11073 - protein, 15 aa, Artificial Sequence
  Cyclic GFR-binding peptide
  MOD_RES (1)..(2): Xaa is C or S
XXTPTKMSSLSMLFF

SEQ ID NO: 11074 - protein, 27 aa, Artificial Sequence
  Cyclic GFR-binding peptide
  MOD_RES (6)..(7): Xaa is C or S
SIPKAXXVPTELSSLSMLFFDEYDKVV

SEQ ID NO: 11075 - protein, 20 aa, Artificial Sequence
  Cyclic GFR-binding peptide
  MOD_RES (6)..(7): Xaa is C or S
KIPKAXXVPTELSSLSMLFF

SEQ ID NO: 11076 - protein, 13 aa, Artificial Sequence
  Cyclic GFR-binding peptide
TPTKMSSLSMLFF

SEQ ID NO: 11077 - protein, 16 aa, Artificial Sequence
  Cyclic GFR-binding peptide
LSSLSVLFFDDSSNVI

SEQ ID NO: 11078 - protein, 14 aa, Artificial Sequence
  Cyclic GFR-binding peptide
  MOD_RES (1)..(1): Xaa is C or S
XVPTEESSLSMLFF

SEQ ID NO: 11079 - protein, 17 aa, Artificial Sequence
  Cyclic GFR-binding peptide
  MOD_RES (3)..(4): Xaa is C or S
GPXXTPTKMSSLSMLFF

SEQ ID NO: 11080 - protein, 20 aa, Artificial Sequence
  Cyclic GFR-binding peptide
  MOD_RES (6)..(7): Xaa is C or S
TVPKPXXAPTQLSSLSVLFF

SEQ ID NO: 11081 - protein, 18 aa, Artificial Sequence
  Cyclic GFR-binding peptide
TELSSLSMLFFDENEKVV

SEQ ID NO: 11082 - protein, 23 aa, Artificial Sequence
  Cyclic GFR-binding peptide
  MOD_RES (5)..(5): Xaa is C or S
SSVKXQPSRVHHSSLSVLFFEYV

SEQ ID NO: 11083 - protein, 18 aa, Artificial Sequence
  Cyclic GFR-binding peptide
  MOD_RES (4)..(5): Xaa is C or S
ASPXXVPQDLSSLSILFF

SEQ ID NO: 11084 - protein, 17 aa, Artificial Sequence
  Cyclic GFR-binding peptide
KLSSLSILFFDKGVVTY

SEQ ID NO: 11085 - protein, 26 aa, Artificial Sequence
  Cyclic GFR-binding peptide
  MOD_RES (6)..(7): Xaa is C or S
HVPKPXXAPTKLSSLSVLFFDDSSNV

SEQ ID NO: 11086 - protein, 21 aa, Artificial Sequence
  Cyclic GFR-binding peptide
  MOD_RES (7)..(7): Xaa is C or S
NDEGLEXVPTEESSLSMLFFR

SEQ ID NO: 11087 - protein, 23 aa, Artificial Sequence
  Cyclic GFR-binding peptide
  MOD_RES (6)..(7): Xaa is C or S
SIPKAXXVPTELSSLSMLFFDEY

SEQ ID NO: 11088 - protein, 21 aa, Artificial Sequence
  Cyclic GFR-binding peptide
  MOD_RES (6)..(7): Xaa is C or S
RVPSTXXAPVKTSSLSMLFFD

SEQ ID NO: 11089 - protein, 24 aa, Artificial Sequence
  Cyclic GFR-binding peptide
  MOD_RES (6)..(7): Xaa is C or S
GSAGPXXTPTKMSSLSMLFFNDKQ

SEQ ID NO: 11090 - protein, 20 aa, Artificial Sequence
  Cyclic GFR-binding peptide
  MOD_RES (6)..(7): Xaa is C or S
RVPSTXXAPVKTSSLSMLFF

SEQ ID NO: 11091 - protein, 13 aa, Artificial Sequence
  Cyclic GFR-binding peptide
VSQDLSSLSILFF

SEQ ID NO: 11092 - protein, 27 aa, Artificial Sequence
  Cyclic GFR-binding peptide
  MOD_RES (6)..(7): Xaa is C or S
STPPTXXVPTRLSSLSILFFDSANNVV

SEQ ID NO: 11093 - protein, 24 aa, Artificial Sequence
  Cyclic GFR-binding peptide
  MOD_RES (6)..(7): Xaa is C or S
AAPASXXVPARLSSLSILFFDAAN

SEQ ID NO: 11094 - protein, 17 aa, Artificial Sequence
  Cyclic GFR-binding peptide
  MOD_RES (4)..(4): Xaa is C or S
KPTXAPTKLSSLSVLFF

SEQ ID NO: 11095 - protein, 19 aa, Artificial Sequence
  Cyclic GFR-binding peptide
SQDLSSLSILFFIGKTPKI

SEQ ID NO: 11096 - protein, 19 aa, Artificial Sequence
  Cyclic GFR-binding peptide
  MOD_RES (6)..(6): Xaa is C or S
VTKPTXAPTKLSSLSVLFF

SEQ ID NO: 11097 - protein, 18 aa, Artificial Sequence
  Cyclic GFR-binding peptide
  MOD_RES (4)..(5): Xaa is C or S
PASXXVPARLSSLSILFF

SEQ ID NO: 11098 - protein, 16 aa, Artificial Sequence
  Cyclic GFR-binding peptide
  MOD_RES (2)..(3): Xaa is C or S
TXXVPTRLSSLSILFF

SEQ ID NO: 11099 - protein, 18 aa, Artificial Sequence
  Cyclic GFR-binding peptide
  MOD_RES (4)..(5): Xaa is C or S
PKAXXVPTELSSLSMLFF

SEQ ID NO: 11100 - protein, 17 aa, Artificial Sequence
  Cyclic GFR-binding peptide
  MOD_RES (3)..(4): Xaa is C or S
ASXXVPARLSSLSILFF

SEQ ID NO: 11101 - protein, 23 aa, Artificial Sequence
  Cyclic GFR-binding peptide
  MOD_RES (6)..(7): Xaa is C or S
KASKAXXVPTKLSSLSILFFDKG

SEQ ID NO: 11102 - protein, 17 aa, Artificial Sequence
  Cyclic GFR-binding peptide
KLSSLSVLFFDSSNNVI

SEQ ID NO: 11103 - protein, 28 aa, Artificial Sequence
  Cyclic GFR-binding peptide
  MOD_RES (5)..(5): Xaa is C or S
SSVKXQPSRVHHSSLSVLFFEYVRKKPK

SEQ ID NO: 11104 - protein, 17 aa, Artificial Sequence
  Cyclic GFR-binding peptide
  MOD_RES (3)..(4): Xaa is C or S
APXXVPQALSSLSILFF

SEQ ID NO: 11105 - protein, 23 aa, Artificial Sequence
  Cyclic GFR-binding peptide
  MOD_RES (6)..(7): Xaa is C or S
KVGKAXXVPTKLSSLSVLFFDDM

SEQ ID NO: 11106 - protein, 22 aa, Artificial Sequence
  Cyclic GFR-binding peptide
  MOD_RES (6)..(7): Xaa is C or S
SIPKAXXVPTELSSLSMLFFDE

SEQ ID NO: 11107 - protein, 21 aa, Artificial Sequence
  Cyclic GFR-binding peptide
  MOD_RES (6)..(7): Xaa is C or S
SIPKAXXVPTELSSLSMLFFD

SEQ ID NO: 11108 - protein, 27 aa, Artificial Sequence
  Cyclic GFR-binding peptide
  MOD_RES (6)..(7): Xaa is C or S
GSAGPXXTPTKMSSLSMLFFNDKQQII

SEQ ID NO: 11109 - protein, 21 aa, Artificial Sequence
  Cyclic GFR-binding peptide
PTEESSLSMLFFRIKPHQGQH

SEQ ID NO: 11110 - protein, 19 aa, Artificial Sequence
  Cyclic GFR-binding peptide
  MOD_RES (5)..(6): Xaa is C or S
IPKAXXVPTELSSLSMLFF

SEQ ID NO: 11111 - protein, 19 aa, Artificial Sequence
  Cyclic GFR-binding peptide
  MOD_RES (5)..(6): Xaa is C or S
VPSTXXAPVKTSSLSMLFF

SEQ ID NO: 11112 - protein, 15 aa, Artificial Sequence
  Cyclic GFR-binding peptide
  MOD_RES (1)..(2): Xaa is C or S
XXAPTQLSSLSVLFF

SEQ ID NO: 11113 - protein, 27 aa, Artificial Sequence
  Cyclic GFR-binding peptide
  MOD_RES (6)..(7): Xaa is C or S
YVPKPXXAPTKLSSLSVLFFDDSSNVI

SEQ ID NO: 11114 - protein, 17 aa, Artificial Sequence
  Cyclic GFR-binding peptide
KTSSLSMLFFDNGRVLL

SEQ ID NO: 11115 - protein, 17 aa, Artificial Sequence
  Cyclic GFR-binding peptide
DLSSLSILFFIGKTPKI

SEQ ID NO: 11116 - protein, 15 aa, Artificial Sequence
  Cyclic GFR-binding peptide
SSLSMLFFNDKQQII

SEQ ID NO: 11117 - protein, 13 aa, Artificial Sequence
  Cyclic GFR-binding peptide
VPARLSSLSILFF

SEQ ID NO: 11118 - protein, 14 aa, Artificial Sequence
  Cyclic GFR-binding peptide
  MOD_RES (1)..(1): Xaa is C or S
XVPTRLSSLSILFF

SEQ ID NO: 11119 - protein, 15 aa, Artificial Sequence
  Cyclic GFR-binding peptide
  MOD_RES (1)..(2): Xaa is C or S
XXVPTKLSSLSILFF

SEQ ID NO: 11120 - protein, 20 aa, Artificial Sequence
  Cyclic GFR-binding peptide
  MOD_RES (6)..(7): Xaa is C or S
KASKAXXVPTKLSSLSILFF

SEQ ID NO: 11121 - protein, 20 aa, Artificial Sequence
  Cyclic GFR-binding peptide
  MOD_RES (6)..(7): Xaa is C or S
HVPKPXXAPTKLSSLSVLFF

SEQ ID NO: 11122 - protein, 16 aa, Artificial Sequence
  Cyclic GFR-binding peptide
LSSLSILFFDAANNVV

SEQ ID NO: 11123 - protein, 22 aa, Artificial Sequence
  Cyclic GFR-binding peptide
  MOD_RES (6)..(7): Xaa is C or S
AVPKAXXAPTKLSSLSVLFFDS

SEQ ID NO: 11124 - protein, 16 aa, Artificial Sequence
  Cyclic GFR-binding peptide
LSSLSILFFVGRTPKV

SEQ ID NO: 11125 - protein, 25 aa, Artificial Sequence
  Cyclic GFR-binding peptide
  MOD_RES (6)..(7): Xaa is C or S
KVGKAXXVPTKLSSLSVLFFDDMGV

SEQ ID NO: 11126 - protein, 21 aa, Artificial Sequence
  Cyclic GFR-binding peptide
  MOD_RES (6)..(7): Xaa is C or S
KVGKAXXVPTKLSSLSVLFFD

SEQ ID NO: 11127 - protein, 19 aa, Artificial Sequence
  Cyclic GFR-binding peptide
  MOD_RES (5)..(6): Xaa is C or S
SASPXXVSQDLSSLSILFF

SEQ ID NO: 11128 - protein, 16 aa, Artificial Sequence
  Cyclic GFR-binding peptide
  MOD_RES (2)..(3): Xaa is C or S
AXXAPTKLSSLSVLFF

SEQ ID NO: 11129 - protein, 24 aa, Artificial Sequence
  Cyclic GFR-binding peptide
  MOD_RES (6)..(7): Xaa is C or S
KIPKAXXVPTELSSLSMLFFDENE

SEQ ID NO: 11130 - protein, 25 aa, Artificial Sequence
  Cyclic GFR-binding peptide
  MOD_RES (6)..(7): Xaa is C or S
ASASPXXVPQDLSSLSILFFVGRTP

SEQ ID NO: 11131 - protein, 22 aa, Artificial Sequence
  Cyclic GFR-binding peptide
  MOD_RES (6)..(7): Xaa is C or S
RVPSTXXAPVKTSSLSMLFFDN

SEQ ID NO: 11132 - protein, 23 aa, Artificial Sequence
  Cyclic GFR-binding peptide
  MOD_RES (6)..(7): Xaa is C or S
ASAAPXXVPQALSSLSILFFVGR

SEQ ID NO: 11133 - protein, 16 aa, Artificial Sequence
  Cyclic GFR-binding peptide
LSSLSMLFFDENEKVV

SEQ ID NO: 11134 - protein, 18 aa, Artificial Sequence
  Cyclic GFR-binding peptide
HSSLSVLFFEYVRKKPKL

SEQ ID NO: 11135 - protein, 26 aa, Artificial Sequence
  Cyclic GFR-binding peptide
  MOD_RES (6)..(7): Xaa is C or S
KIPKAXXVPTELSSLSMLFFDENEKV

SEQ ID NO: 11136 - protein, 19 aa, Artificial Sequence
  Cyclic GFR-binding peptide
  MOD_RES (5)..(6): Xaa is C or S
VPKPXXAPTKLSSLSVLFF

SEQ ID NO: 11137 - protein, 17 aa, Artificial Sequence
  Cyclic GFR-binding peptide
  MOD_RES (3)..(4): Xaa is C or S
KAXXVPTKLSSLSVLFF

SEQ ID NO: 11138 - protein, 19 aa, Artificial Sequence
  Cyclic GFR-binding peptide
  MOD_RES (6)..(6): Xaa is C or S
DEGLEXVPTEESSLSMLFF

SEQ ID NO: 11139 - protein, 14 aa, Artificial Sequence
  Cyclic GFR-binding peptide
  MOD_RES (1)..(1): Xaa is C or S
XAPTKLSSLSVLFF

SEQ ID NO: 11140 - protein, 17 aa, Artificial Sequence
  Cyclic GFR-binding peptide
ELSSLSMLFFDENEKVV

SEQ ID NO: 11141 - protein, 27 aa, Artificial Sequence
  Cyclic GFR-binding peptide
  MOD_RES (6)..(7): Xaa is C or S
KASKAXXVPTKLSSLSILFFDKGVVTY

SEQ ID NO: 11142 - protein, 24 aa, Artificial Sequence
  Cyclic GFR-binding peptide
  MOD_RES (6)..(7): Xaa is C or S
ASASPXXVSQDLSSLSILFFIGKT

SEQ ID NO: 11143 - protein, 18 aa, Artificial Sequence
  Cyclic GFR-binding peptide
  MOD_RES (4)..(5): Xaa is C or S
GKAXXVPTKLSSLSVLFF

SEQ ID NO: 11144 - protein, 27 aa, Artificial Sequence
  Cyclic GFR-binding peptide
  MOD_RES (6)..(7): Xaa is C or S
ASAAPXXVPQALSSLSILFFVGRKPKV

SEQ ID NO: 11145 - protein, 20 aa, Artificial Sequence
  Cyclic GFR-binding peptide
  MOD_RES (6)..(7): Xaa is C or S
ASASPXXVSQDLSSLSILFF

SEQ ID NO: 11146 - protein, 24 aa, Artificial Sequence
  Cyclic GFR-binding peptide
  MOD_RES (6)..(7): Xaa is C or S
HVPKPXXAPTKLSSLSVLFFDDSS

SEQ ID NO: 11147 - protein, 18 aa, Artificial Sequence
  Cyclic GFR-binding peptide
TKLSSLSVLFFDDMGVPT

SEQ ID NO: 11148 - protein, 26 aa, Artificial Sequence
  Cyclic GFR-binding peptide
  MOD_RES (6)..(7): Xaa is C or S
ASAAPXXVPQALSSLSILFFVGRKPK

SEQ ID NO: 11149 - protein, 16 aa, Artificial Sequence
  Cyclic GFR-binding peptide
LSSLSILFFDSANNVV

SEQ ID NO: 11150 - protein, 13 aa, Artificial Sequence
  Cyclic GFR-binding peptide
VPTEESSLSMLFF

SEQ ID NO: 11151 - protein, 18 aa, Artificial Sequence
  Cyclic GFR-binding peptide
QALSSLSILFFVGRKPKV

SEQ ID NO: 11152 - protein, 22 aa, Artificial Sequence
  Cyclic GFR-binding peptide
  MOD_RES (6)..(7): Xaa is C or S
HVPKPXXAPTKLSSLSVLFFDD

SEQ ID NO: 11153 - protein, 25 aa, Artificial Sequence
  Cyclic GFR-binding peptide
  MOD_RES (7)..(7): Xaa is C or S
NDEGLEXVPTEESSLSMLFFRIKPH

SEQ ID NO: 11154 - protein, 17 aa, Artificial Sequence
  Cyclic GFR-binding peptide
  MOD_RES (3)..(4): Xaa is C or S
KAXXVPTELSSLSMLFF

SEQ ID NO: 11155 - protein, 21 aa, Artificial Sequence
  Cyclic GFR-binding peptide
  MOD_RES (7)..(7): Xaa is C or S
HVTKPTXAPTKLSSLSVLFFD

SEQ ID NO: 11156 - protein, 16 aa, Artificial Sequence
  Cyclic GFR-binding peptide
LSSLSVLFFDDMGVPT

SEQ ID NO: 11157 - protein, 16 aa, Artificial Sequence
  Cyclic GFR-binding peptide
  MOD_RES (2)..(3): Xaa is C or S
PXXVPQALSSLSILFF

SEQ ID NO: 11158 - protein, 20 aa, Artificial Sequence
  Cyclic GFR-binding peptide
  MOD_RES (6)..(7): Xaa is C or S
AVPKAXXAPTKLSSLSVLFF

SEQ ID NO: 11159 - protein, 19 aa, Artificial Sequence
  Cyclic GFR-binding peptide
  MOD_RES (5)..(6): Xaa is C or S
TPPTXXVPTRLSSLSILFF

SEQ ID NO: 11160 - protein, 21 aa, Artificial Sequence
  Cyclic GFR-binding peptide
  MOD_RES (5)..(5): Xaa is C or S
SSVKXQPSRVHHSSLSVLFFE

SEQ ID NO: 11161 - protein, 19 aa, Artificial Sequence
  Cyclic GFR-binding peptide
  MOD_RES (5)..(6): Xaa is C or S
ASKAXXVPTKLSSLSILFF

SEQ ID NO: 11162 - protein, 15 aa, Artificial Sequence
  Cyclic GFR-binding peptide
SSLSVLFFDSSNNVI

SEQ ID NO: 11163 - protein, 25 aa, Artificial Sequence
  Cyclic GFR-binding peptide
  MOD_RES (6)..(7): Xaa is C or S
KIPKAXXVPTELSSLSMLFFDENEK

SEQ ID NO: 11164 - protein, 15 aa, Artificial Sequence
  Cyclic GFR-binding peptide
  MOD_RES (2)..(2): Xaa is C or S
EXVPTEESSLSMLFF

SEQ ID NO: 11165 - protein, 21 aa, Artificial Sequence
  Cyclic GFR-binding peptide
  MOD_RES (6)..(7): Xaa is C or S
ASASPXXVPQDLSSLSILFFV

SEQ ID NO: 11166 - protein, 21 aa, Artificial Sequence
  Cyclic GFR-binding peptide
  MOD_RES (6)..(7): Xaa is C or S
TVPKPXXAPTQLSSLSVLFFD

SEQ ID NO: 11167 - protein, 21 aa, Artificial Sequence
  Cyclic GFR-binding peptide
  MOD_RES (6)..(7): Xaa is C or S
GSAGPXXTPTKMSSLSMLFFN

SEQ ID NO: 11168 - protein, 26 aa, Artificial Sequence
  Cyclic GFR-binding peptide
  MOD_RES (6)..(7): Xaa is C or S
SIPKAXXVPTELSSLSMLFFDEYDKV

SEQ ID NO: 11169 - protein, 14 aa, Artificial Sequence
  Cyclic GFR-binding peptide
  MOD_RES (1)..(1): Xaa is C or S
XAPVKTSSLSMLFF

SEQ ID NO: 11170 - protein, 17 aa, Artificial Sequence
  Cyclic GFR-binding peptide
  MOD_RES (3)..(4): Xaa is C or S
SPXXVPQDLSSLSILFF

SEQ ID NO: 11171 - protein, 15 aa, Artificial Sequence
  Cyclic GFR-binding peptide
  MOD_RES (14)..(15): Xaa is C or S
VKAIKVSRLDQSVXX

SEQ ID NO: 11172 - protein, 22 aa, Artificial Sequence
  Cyclic GFR-binding peptide
  MOD_RES (18)..(18): Xaa is C or S
YEYYVVPLPEHHVRSPQXKVSS

SEQ ID NO: 11173 - protein, 20 aa, Artificial Sequence
  Cyclic GFR-binding peptide
  MOD_RES (14)..(15): Xaa is C or S
VKAVKVSRLKTPAXXPKPVY

SEQ ID NO: 11174 - protein, 28 aa, Artificial Sequence
  Cyclic GFR-binding peptide
  MOD_RES (24)..(24): Xaa is C or S
IPKKRVIEYYVVPLPELQVQTPRXQVNR

SEQ ID NO: 11175 - protein, 23 aa, Artificial Sequence
  Cyclic GFR-binding peptide
  MOD_RES (17)..(18): Xaa is C or S
RGVIKRIQVPRLAQPVXXPAASA

SEQ ID NO: 11176 - protein, 19 aa, Artificial Sequence
  Cyclic GFR-binding peptide
  MOD_RES (14)..(15): Xaa is C or S
VKAVKVSRLQTPAXXPKPV

SEQ ID NO: 11177 - protein, 26 aa, Artificial Sequence
  Cyclic GFR-binding peptide
  MOD_RES (20)..(20): Xaa is C or S
QHPKIRYYLMTLPEEETPVXELGEDN

SEQ ID NO: 11178 - protein, 16 aa, Artificial Sequence
  Cyclic GFR-binding peptide
VVKENEDVKAMKVSRL

SEQ ID NO: 11179 - protein, 21 aa, Artificial Sequence
  Cyclic GFR-binding peptide
  MOD_RES (15)..(16): Xaa is C or S
DMIQMTINSLETPVXXAKPIK

SEQ ID NO: 11180 - protein, 18 aa, Artificial Sequence
  Cyclic GFR-binding peptide
IKPTKGIVKAIKVSRLDQ

SEQ ID NO: 11181 - protein, 17 aa, Artificial Sequence
  Cyclic GFR-binding peptide
  MOD_RES (14)..(15): Xaa is C or S
IKRIQVPRLAQPVXXPA

SEQ ID NO: 11182 - protein, 18 aa, Artificial Sequence
  Cyclic GFR-binding peptide
VVKDYEDMIQMTINSLET

SEQ ID NO: 11183 - protein, 22 aa, Artificial Sequence
  Cyclic GFR-binding peptide
  MOD_RES (16)..(17): Xaa is C or S
EDMIQMTINSLETPVXXAKPIS

SEQ ID NO: 11184 - protein, 14 aa, Artificial Sequence
  Cyclic GFR-binding peptide
  MOD_RES (14)..(14): Xaa is C or S
MIQMTINSLETPVX

SEQ ID NO: 11185 - protein, 13 aa, Artificial Sequence
  Cyclic GFR-binding peptide
VKAIKVSRLDQSV

SEQ ID NO: 11186 - protein, 24 aa, Artificial Sequence
  Cyclic GFR-binding peptide
  MOD_RES (18)..(19): Xaa is C or S
ENEDVKAMKVSRLETPVXXAKPIK

SEQ ID NO: 11187 - protein, 27 aa, Artificial Sequence
  Cyclic GFR-binding peptide
  MOD_RES (21)..(22): Xaa is C or S
VKPKRGVIKRIQVPRLAQPVXXPAASA

SEQ ID NO: 11188 - protein, 15 aa, Artificial Sequence
  Cyclic GFR-binding peptide
VKPKRGVIKRIQVPR

SEQ ID NO: 11189 - protein, 14 aa, Artificial Sequence
  Cyclic GFR-binding peptide
  MOD_RES (14)..(14): Xaa is C or S
MIQITINSLDQPVX

SEQ ID NO: 11190 - protein, 22 aa, Artificial Sequence
  Cyclic GFR-binding peptide
  MOD_RES (16)..(17): Xaa is C or S
GIMIQITINSLDQSVXXPSASA

SEQ ID NO: 11191 - protein, 23 aa, Artificial Sequence
  Cyclic GFR-binding peptide
  MOD_RES (17)..(18): Xaa is C or S
YEDMIQMTINSLETPVXXAKPIS

SEQ ID NO: 11192 - protein, 14 aa, Artificial Sequence
  Cyclic GFR-binding peptide
  MOD_RES (14)..(14): Xaa is C or S
YYLMTLPEEETPVX

SEQ ID NO: 11193 - protein, 18 aa, Artificial Sequence
  Cyclic GFR-binding peptide
  MOD_RES (14)..(14): Xaa is C or S
IKRVQVPRLKTPAXTPKT

SEQ ID NO: 11194 - protein, 17 aa, Artificial Sequence
  Cyclic GFR-binding peptide
VVKENEDMIQMTINSLE

SEQ ID NO: 11195 - protein, 14 aa, Artificial Sequence
  Cyclic GFR-binding peptide
  MOD_RES (14)..(14): Xaa is C or S
IKRMQVPRLETPVX

SEQ ID NO: 11196 - protein, 16 aa, Artificial Sequence
  Cyclic GFR-binding peptide
VVKENEDMIQMTINSL

SEQ ID NO: 11197 - protein, 17 aa, Artificial Sequence
  Cyclic GFR-binding peptide
  MOD_RES (14)..(15): Xaa is C or S
IKRVQVPRLQTPAXXPK

SEQ ID NO: 11198 - protein, 22 aa, Artificial Sequence
  Cyclic GFR-binding peptide
  MOD_RES (16)..(16): Xaa is C or S
DDIKRVQVPRLKTPAXTPKTVH

SEQ ID NO: 11199 - protein, 18 aa, Artificial Sequence
  Cyclic GFR-binding peptide
IKPTKGIMIQITINSLDQ

SEQ ID NO: 11200 - protein, 25 aa, Artificial Sequence
  Cyclic GFR-binding peptide
  MOD_RES (19)..(19): Xaa is C or S
NSSDDVKAVKVSRLKTPAXTPKTVH

SEQ ID NO: 11201 - protein, 17 aa, Artificial Sequence
  Cyclic GFR-binding peptide
  MOD_RES (14)..(15): Xaa is C or S
MIQITINSLAQPVXXPA

SEQ ID NO: 11202 - protein, 18 aa, Artificial Sequence
  Cyclic GFR-binding peptide
VVKDYEDVKAMKVSRLET

SEQ ID NO: 11203 - protein, 22 aa, Artificial Sequence
  Cyclic GFR-binding peptide
  MOD_RES (16)..(17): Xaa is C or S
EDIKRMQVPRLETPVXXAKPIK

SEQ ID NO: 11204 - protein, 18 aa, Artificial Sequence
  Cyclic GFR-binding peptide
  MOD_RES (14)..(15): Xaa is C or S
MIQMTINSLETPVXXAKP

SEQ ID NO: 11205 - protein, 23 aa, Artificial Sequence
  Cyclic GFR-binding peptide
  MOD_RES (19)..(19): Xaa is C or S
VYEYYLVTLPEHHVRSPQXKVSS

SEQ ID NO: 11206 - protein, 17 aa, Artificial Sequence
  Cyclic GFR-binding peptide
  MOD_RES (14)..(15): Xaa is C or S
VKAIKVSRLDQSVXXPS

SEQ ID NO: 11207 - protein, 21 aa, Artificial Sequence
  Cyclic GFR-binding peptide
  MOD_RES (15)..(15): Xaa is C or S
DIKRVQVPRLKTPAXTPKTVH

SEQ ID NO: 11208 - protein, 25 aa, Artificial Sequence
  Cyclic GFR-binding peptide
  MOD_RES (19)..(20): Xaa is C or S
KDYEDIKRMQVPRLETPVXXAKPIS

SEQ ID NO: 11209 - protein, 27 aa, Artificial Sequence
  Cyclic GFR-binding peptide
  MOD_RES (21)..(22): Xaa is C or S
IKPTKGIVKAIKVSRLDQSVXXPSASA

SEQ ID NO: 11210 - protein, 19 aa, Artificial Sequence
  Cyclic GFR-binding peptide
VVKDYEDVKAMKVSRLETP

SEQ ID NO: 11211 - protein, 13 aa, Artificial Sequence
  Cyclic GFR-binding peptide
IKRMQVPRLETPV

SEQ ID NO: 11212 - protein, 21 aa, Artificial Sequence
  Cyclic GFR-binding peptide
  MOD_RES (15)..(16): Xaa is C or S
IVKAIKVSRLDQSVXXPSASA

SEQ ID NO: 11213 - protein, 25 aa, Artificial Sequence
  Cyclic GFR-binding peptide
  MOD_RES (19)..(20): Xaa is C or S
KDYEDMIQMTINSLETPVXXAKPIS

SEQ ID NO: 11214 - protein, 19 aa, Artificial Sequence
  Cyclic GFR-binding peptide
  MOD_RES (14)..(15): Xaa is C or S
VKAIKVSRLDQSVXXPSAS

SEQ ID NO: 11215 - protein, 24 aa, Artificial Sequence
  Cyclic GFR-binding peptide
  MOD_RES (18)..(19): Xaa is C or S
TRGVVKAIKVSRLDQPVXXPSASA

SEQ ID NO: 11216 - protein, 19 aa, Artificial Sequence
  Cyclic GFR-binding peptide
FIPKKRVIEYYLVTLPELQ

SEQ ID NO: 11217 - protein, 14 aa, Artificial Sequence
  Cyclic GFR-binding peptide
  MOD_RES (14)..(14): Xaa is C or S
YYVMPLPEEETPVX

SEQ ID NO: 11218 - protein, 19 aa, Artificial Sequence
  Cyclic GFR-binding peptide
  MOD_RES (14)..(15): Xaa is C or S
VKAMKVSRLETPVXXAKPI

SEQ ID NO: 11219 - protein, 26 aa, Artificial Sequence
  Cyclic GFR-binding peptide
  MOD_RES (20)..(20): Xaa is C or S
VNSSDDVKAVKVSRLKTPAXTPKTVH

SEQ ID NO: 11220 - protein, 24 aa, Artificial Sequence
  Cyclic GFR-binding peptide
  MOD_RES (18)..(19): Xaa is C or S
ENEDMIQMTINSLETPVXXAKPIK

SEQ ID NO: 11221 - protein, 28 aa, Artificial Sequence
  Cyclic GFR-binding peptide
  MOD_RES (22)..(22): Xaa is C or S
QGQHPKIRYYVMPLPEEETPVXELGEDN

SEQ ID NO: 11222 - protein, 27 aa, Artificial Sequence
  Cyclic GFR-binding peptide
  MOD_RES (23)..(23): Xaa is C or S
PKKRVIEYYVVPLPELQVQTPRXQVNR

SEQ ID NO: 11223 - protein, 17 aa, Artificial Sequence
  Cyclic GFR-binding peptide
IVNSSDDIKRVQVPRLK

SEQ ID NO: 11224 - protein, 14 aa, Artificial Sequence
  Cyclic GFR-binding peptide
  MOD_RES (14)..(14): Xaa is C or S
VKAIKVSRLAQPVX

SEQ ID NO: 11225 - protein, 16 aa, Artificial Sequence
  Cyclic GFR-binding peptide
IVNSSDDIKRVQVPRL

SEQ ID NO: 11226 - protein, 15 aa, Artificial Sequence
  Cyclic GFR-binding peptide
  MOD_RES (14)..(15): Xaa is C or S
IKRMQVPRLETPVXX

SEQ ID NO: 11227 - protein, 27 aa, Artificial Sequence
  Cyclic GFR-binding peptide
  MOD_RES (21)..(22): Xaa is C or S
IKPTKGIMIQITINSLDQSVXXPSASA

SEQ ID NO: 11228 - protein, 26 aa, Artificial Sequence
  Cyclic GFR-binding peptide
  MOD_RES (20)..(20): Xaa is C or S
VNSSDDIKRVQVPRLKTPAXTPKTVH

SEQ ID NO: 11229 - protein, 14 aa, Artificial Sequence
  Cyclic GFR-binding peptide
  MOD_RES (14)..(14): Xaa is C or S
IKRIQVPRLDQSVX

SEQ ID NO: 11230 - protein, 15 aa, Artificial Sequence
  Cyclic GFR-binding peptide
  MOD_RES (14)..(14): Xaa is C or S
YYLMTLPEEETPVXE

SEQ ID NO: 11231 - protein, 16 aa, Artificial Sequence
  Cyclic GFR-binding peptide
  MOD_RES (14)..(15): Xaa is C or S
VKAMKVSRLETPVXXA

SEQ ID NO: 11232 - protein, 17 aa, Artificial Sequence
  Cyclic GFR-binding peptide
IVNSSDDIKRVQVPRLQ

SEQ ID NO: 11233 - protein, 21 aa, Artificial Sequence
  Cyclic GFR-binding peptide
  MOD_RES (15)..(16): Xaa is C or S
VMIQITINSLAQPVXXPAASA

SEQ ID NO: 11234 - protein, 13 aa, Artificial Sequence
  Cyclic GFR-binding peptide
VKAVKVSRLQTPA

SEQ ID NO: 11235 - protein, 23 aa, Artificial Sequence
  Cyclic GFR-binding peptide
  MOD_RES (17)..(18): Xaa is C or S
YEDVKAMKVSRLETPVXXAKPIS

SEQ ID NO: 11236 - protein, 19 aa, Artificial Sequence
  Cyclic GFR-binding peptide
VVKDYEDMIQMTINSLETP

SEQ ID NO: 11237 - protein, 15 aa, Artificial Sequence
  Cyclic GFR-binding peptide
  MOD_RES (14)..(15): Xaa is C or S
VKAVKVSRLQTPAXX

SEQ ID NO: 11238 - protein, 25 aa, Artificial Sequence
  Cyclic GFR-binding peptide
  MOD_RES (19)..(19): Xaa is C or S
NSSDDMIQVTINSLKTPAXTPKTVH

SEQ ID NO: 11239 - protein, 23 aa, Artificial Sequence
  Cyclic GFR-binding peptide
  MOD_RES (19)..(19): Xaa is C or S
VYEYYVVPLPEHHVRSPQXKVSS

SEQ ID NO: 11240 - protein, 17 aa, Artificial Sequence
  Cyclic GFR-binding peptide
  MOD_RES (14)..(15): Xaa is C or S
MIQITINSLDQPVXXPS

SEQ ID NO: 11241 - protein, 24 aa, Artificial Sequence
  Cyclic GFR-binding peptide
  MOD_RES (18)..(19): Xaa is C or S
TRGVMIQITINSLDQPVXXPSASA

SEQ ID NO: 11242 - protein, 21 aa, Artificial Sequence
  Cyclic GFR-binding peptide
  MOD_RES (15)..(16): Xaa is C or S
DIKRMQVPRLETPVXXAKPIK

SEQ ID NO: 11243 - protein, 13 aa, Artificial Sequence
  Cyclic GFR-binding peptide
IKRIQVPRLDQPV

SEQ ID NO: 11244 - protein, 15 aa, Artificial Sequence
  Cyclic GFR-binding peptide
  MOD_RES (14)..(15): Xaa is C or S
IKRIQVPRLDQPVXX

SEQ ID NO: 11245 - protein, 15 aa, Artificial Sequence
  Cyclic GFR-binding peptide
  MOD_RES (14)..(15): Xaa is C or S
MIQMTINSLETPVXX

SEQ ID NO: 11246 - protein, 17 aa, Artificial Sequence
  Cyclic GFR-binding peptide
VKPTRGVIKRIQVPRLD

SEQ ID NO: 11247 - protein, 13 aa, Artificial Sequence
  Cyclic GFR-binding peptide
YYLMTLPEEETPV

SEQ ID NO: 11248 - protein, 18 aa, Artificial Sequence
  Cyclic GFR-binding peptide
VKPKRGVMIQITINSLAQ

SEQ ID NO: 11249 - protein, 16 aa, Artificial Sequence
  Cyclic GFR-binding peptide
IKPTKGIIKRIQVPRL

SEQ ID NO: 11250 - protein, 22 aa, Artificial Sequence
  Cyclic GFR-binding peptide
  MOD_RES (18)..(18): Xaa is C or S
YEYYLVTLPEHHVRSPQXKVSS

SEQ ID NO: 11251 - protein, 15 aa, Artificial Sequence
  Cyclic GFR-binding peptide
VKPTRGVIKRIQVPR

SEQ ID NO: 11252 - protein, 17 aa, Artificial Sequence
  Cyclic GFR-binding peptide
  MOD_RES (14)..(15): Xaa is C or S
VKAVKVSRLQTPAXXPK

SEQ ID NO: 11253 - protein, 15 aa, Artificial Sequence
  Cyclic GFR-binding peptide
  MOD_RES (14)..(15): Xaa is C or S
VKAIKVSRLDQPVXX

SEQ ID NO: 11254 - protein, 19 aa, Artificial Sequence
  Cyclic GFR-binding peptide
  MOD_RES (14)..(15): Xaa is C or S
IKRMQVPRLETPVXXAKPI

SEQ ID NO: 11255 - protein, 26 aa, Artificial Sequence
  Cyclic GFR-binding peptide
  MOD_RES (20)..(21): Xaa is C or S
VKDYEDVKAMKVSRLETPVXXAKPIS

SEQ ID NO: 11256 - protein, 18 aa, Artificial Sequence
  Cyclic GFR-binding peptide
LKPKKRVYEYYLVTLPEH

SEQ ID NO: 11257 - protein, 18 aa, Artificial Sequence
  Cyclic GFR-binding peptide
VKPKRGVVKAIKVSRLAQ

SEQ ID NO: 11258 - protein, 18 aa, Artificial Sequence
  Cyclic GFR-binding peptide
  MOD_RES (14)..(14): Xaa is C or S
VKAVKVSRLKTPAXTPKT

SEQ ID NO: 11259 - protein, 17 aa, Artificial Sequence
  Cyclic GFR-binding peptide
  MOD_RES (14)..(15): Xaa is C or S
IKRIQVPRLDQSVXXPS

SEQ ID NO: 11260 - protein, 26 aa, Artificial Sequence
  Cyclic GFR-binding peptide
  MOD_RES (20)..(21): Xaa is C or S
KPTKGIMIQITINSLDQSVXXPSASA

SEQ ID NO: 11261 - protein, 19 aa, Artificial Sequence
  Cyclic GFR-binding peptide
  MOD_RES (14)..(15): Xaa is C or S
IKRIQVPRLDQPVXXPSAS

SEQ ID NO: 11262 - protein, 16 aa, Artificial Sequence
  Cyclic GFR-binding peptide
  MOD_RES (14)..(14): Xaa is C or S
VKAVKVSRLKTPAXTP

SEQ ID NO: 11263 - protein, 22 aa, Artificial Sequence
  Cyclic GFR-binding peptide
  MOD_RES (16)..(17): Xaa is C or S
GVIKRIQVPRLAQPVXXPAASA

SEQ ID NO: 11264 - protein, 21 aa, Artificial Sequence
  Cyclic GFR-binding peptide
  MOD_RES (15)..(16): Xaa is C or S
VIKRIQVPRLAQPVXXPAASA

SEQ ID NO: 11265 - protein, 15 aa, Artificial Sequence
  Cyclic GFR-binding peptide
VVKENEDVKAMKVSR

SEQ ID NO: 11266 - protein, 17 aa, Artificial Sequence
  Cyclic GFR-binding peptide
  MOD_RES (14)..(14): Xaa is C or S
YYLMTLPEEETPVXELG

SEQ ID NO: 11267 - protein, 16 aa, Artificial Sequence
  Cyclic GFR-binding peptide
  MOD_RES (14)..(15): Xaa is C or S
IKRVQVPRLKTPAXXP

SEQ ID NO: 11268 - protein, 13 aa, Artificial Sequence
  Cyclic GFR-binding peptide
VKAIKVSRLDQPV

SEQ ID NO: 11269 - protein, 22 aa, Artificial Sequence
  Cyclic GFR-binding peptide
  MOD_RES (16)..(17): Xaa is C or S
GVMIQITINSLAQPVXXPAASA

SEQ ID NO: 11270 - protein, 15 aa, Artificial Sequence
  Cyclic GFR-binding peptide
VVKDYEDVKAMKVSR

SEQ ID NO: 11271 - protein, 18 aa, Artificial Sequence
  Cyclic GFR-binding peptide
LKPKKRVYEYYVVPLPEH

SEQ ID NO: 11272 - protein, 15 aa, Artificial Sequence
  Cyclic GFR-binding peptide
IVNSSDDIKRVQVPR

SEQ ID NO: 11273 - protein, 26 aa, Artificial Sequence
  Cyclic GFR-binding peptide
  MOD_RES (20)..(21): Xaa is C or S
KPTRGVMIQITINSLDQPVXXPSASA

SEQ ID NO: 11274 - protein, 16 aa, Artificial Sequence
  Cyclic GFR-binding peptide
  MOD_RES (14)..(15): Xaa is C or S
VKAVKVSRLKTPAXXP

SEQ ID NO: 11275 - protein, 23 aa, Artificial Sequence
  Cyclic GFR-binding peptide
  MOD_RES (17)..(18): Xaa is C or S
SDDVKAVKVSRLKTPAXXPKPVY

SEQ ID NO: 11276 - protein, 17 aa, Artificial Sequence
  Cyclic GFR-binding peptide
  MOD_RES (14)..(15): Xaa is C or S
MIQITINSLDQSVXXPS

SEQ ID NO: 11277 - protein, 16 aa, Artificial Sequence
  Cyclic GFR-binding peptide
  MOD_RES (14)..(14): Xaa is C or S
IKRVQVPRLKTPAXTP

SEQ ID NO: 11278 - protein, 18 aa, Artificial Sequence
  Cyclic GFR-binding peptide
VKPTRGVVKAIKVSRLDQ

SEQ ID NO: 11279 - protein, 25 aa, Artificial Sequence
  Cyclic GFR-binding peptide
  MOD_RES (19)..(20): Xaa is C or S
KDYEDVKAMKVSRLETPVXXAKPIS

SEQ ID NO: 11280 - protein, 15 aa, Artificial Sequence
  Cyclic GFR-binding peptide
  MOD_RES (14)..(15): Xaa is C or S
VKAIKVSRLAQPVXX

SEQ ID NO: 11281 - protein, 13 aa, Artificial Sequence
  Cyclic GFR-binding peptide
MIQMTINSLETPV

SEQ ID NO: 11282 - protein, 29 aa, Artificial Sequence
  Cyclic GFR-binding peptide
  MOD_RES (25)..(25): Xaa is C or S
FIPKKRVIEYYVVPLPELQVQTPRXQVNR

SEQ ID NO: 11283 - protein, 26 aa, Artificial Sequence
  Cyclic GFR-binding peptide
  MOD_RES (20)..(21): Xaa is C or S
VNSSDDVKAVKVSRLKTPAXXPKPVY

SEQ ID NO: 11284 - protein, 15 aa, Artificial Sequence
  Cyclic GFR-binding peptide
  MOD_RES (14)..(15): Xaa is C or S
IKRIQVPRLDQSVXX

SEQ ID NO: 11285 - protein, 20 aa, Artificial Sequence
  Cyclic GFR-binding peptide
  MOD_RES (14)..(15): Xaa is C or S
IKRVQVPRLKTPAXXPKPVY

SEQ ID NO: 11286 - protein, 22 aa, Artificial Sequence
  Cyclic GFR-binding peptide
  MOD_RES (16)..(16): Xaa is C or S
DDMIQVTINSLKTPAXTPKTVH

SEQ ID NO: 11287 - protein, 24 aa, Artificial Sequence
  Cyclic GFR-binding peptide
  MOD_RES (18)..(18): Xaa is C or S
SSDDIKRVQVPRLKTPAXTPKTVH

SEQ ID NO: 11288 - protein, 26 aa, Artificial Sequence
  Cyclic GFR-binding peptide
  MOD_RES (20)..(21): Xaa is C or S
VNSSDDIKRVQVPRLKTPAXXPKPVY

SEQ ID NO: 11289 - protein, 15 aa, Artificial Sequence
  Cyclic GFR-binding peptide
VVKDYEDMIQMTINS

SEQ ID NO: 11290 - protein, 14 aa, Artificial Sequence
  Cyclic GFR-binding peptide
  MOD_RES (14)..(14): Xaa is C or S
VKAIKVSRLDQSVX

SEQ ID NO: 11291 - protein, 27 aa, Artificial Sequence
  Cyclic GFR-binding peptide
  MOD_RES (21)..(22): Xaa is C or S
IVNSSDDIKRVQVPRLKTPAXXPKPVY

SEQ ID NO: 11292 - protein, 26 aa, Artificial Sequence
  Cyclic GFR-binding peptide
  MOD_RES (22)..(22): Xaa is C or S
KKRVIEYYVVPLPELQVQTPRXQVNR

SEQ ID NO: 11293 - protein, 13 aa, Artificial Sequence
  Cyclic GFR-binding peptide
IKRIQVPRLDQSV

SEQ ID NO: 11294 - protein, 19 aa, Artificial Sequence
  Cyclic GFR-binding peptide
  MOD_RES (14)..(15): Xaa is C or S
MIQITINSLAQPVXXPAAS

SEQ ID NO: 11295 - protein, 18 aa, Artificial Sequence
  Cyclic GFR-binding peptide
VKPTRGVMIQITINSLDQ

SEQ ID NO: 11296 - protein, 26 aa, Artificial Sequence
  Cyclic GFR-binding peptide
  MOD_RES (20)..(21): Xaa is C or S
KPKRGVVKAIKVSRLAQPVXXPAASA

SEQ ID NO: 11297 - protein, 17 aa, Artificial Sequence
  Cyclic GFR-binding peptide
  MOD_RES (14)..(15): Xaa is C or S
IKRIQVPRLDQPVXXPS

SEQ ID NO: 11298 - protein, 13 aa, Artificial Sequence
  Cyclic GFR-binding peptide
YYVMPLPEEETPV

SEQ ID NO: 11299 - protein, 22 aa, Artificial Sequence
  Cyclic GFR-binding peptide
  MOD_RES (16)..(17): Xaa is C or S
EDIKRMQVPRLETPVXXAKPIS

SEQ ID NO: 11300 - protein, 13 aa, Artificial Sequence
  Cyclic GFR-binding peptide
VKAIKVSRLAQPV

SEQ ID NO: 11301 - protein, 19 aa, Artificial Sequence
  Cyclic GFR-binding peptide
VVKENEDIKRMQVPRLETP

SEQ ID NO: 11302 - protein, 19 aa, Artificial Sequence
  Cyclic GFR-binding peptide
  MOD_RES (14)..(15): Xaa is C or S
VKAIKVSRLDQPVXXPSAS

SEQ ID NO: 11303 - protein, 26 aa, Artificial Sequence
  Cyclic GFR-binding peptide
  MOD_RES (20)..(21): Xaa is C or S
VNSSDDIKRVQVPRLQTPAXXPKPVT

SEQ ID NO: 11304 - protein, 21 aa, Artificial Sequence
  Cyclic GFR-binding peptide
  MOD_RES (17)..(17): Xaa is C or S
EYYLVTLPEHHVRSPQXKVSS

SEQ ID NO: 11305 - protein, 21 aa, Artificial Sequence
  Cyclic GFR-binding peptide
  MOD_RES (15)..(15): Xaa is C or S
DMIQVTINSLKTPAXTPKTVH

SEQ ID NO: 11306 - protein, 17 aa, Artificial Sequence
  Cyclic GFR-binding peptide
  MOD_RES (14)..(14): Xaa is C or S
YYVMPLPEEETPVXELG

SEQ ID NO: 11307 - protein, 23 aa, Artificial Sequence
  Cyclic GFR-binding peptide
  MOD_RES (17)..(18): Xaa is C or S
SDDMIQVTINSLKTPAXXPKPVY

SEQ ID NO: 11308 - protein, 25 aa, Artificial Sequence
  Cyclic GFR-binding peptide
  MOD_RES (19)..(20): Xaa is C or S
PTKGIIKRIQVPRLDQSVXXPSASA

SEQ ID NO: 11309 - protein, 20 aa, Artificial Sequence
  Cyclic GFR-binding peptide
  MOD_RES (14)..(15): Xaa is C or S
MIQMTINSLETPVXXAKPIS

SEQ ID NO: 11310 - protein, 21 aa, Artificial Sequence
  Cyclic GFR-binding peptide
HQGQHPKIRYYLMTLPEEETP

SEQ ID NO: 11311 - protein, 17 aa, Artificial Sequence
  Cyclic GFR-binding peptide
  MOD_RES (14)..(15): Xaa is C or S
VKAVKVSRLKTPAXXPK

SEQ ID NO: 11312 - protein, 15 aa, Artificial Sequence
  Cyclic GFR-binding peptide
  MOD_RES (14)..(14): Xaa is C or S
MIQVTINSLKTPAXT

SEQ ID NO: 11313 - protein, 25 aa, Artificial Sequence
  Cyclic GFR-binding peptide
  MOD_RES (21)..(21): Xaa is C or S
KRVYEYYVVPLPEHHVRSPQXKVSS

SEQ ID NO: 11314 - protein, 20 aa, Artificial Sequence
  Cyclic GFR-binding peptide
  MOD_RES (14)..(15): Xaa is C or S
VKAIKVSRLAQPVXXPAASA

SEQ ID NO: 11315 - protein, 27 aa, Artificial Sequence
  Cyclic GFR-binding peptide
  MOD_RES (21)..(22): Xaa is C or S
IVNSSDDMIQVTINSLKTPAXXPKPVY

SEQ ID NO: 11316 - protein, 23 aa, Artificial Sequence
  Cyclic GFR-binding peptide
  MOD_RES (17)..(18): Xaa is C or S
RGVIKRIQVPRLDQPVXXPSASA

SEQ ID NO: 11317 - protein, 27 aa, Artificial Sequence
  Cyclic GFR-binding peptide
  MOD_RES (23)..(23): Xaa is C or S
PKKRVIEYYLVTLPELQVQTPRXQVNR

SEQ ID NO: 11318 - protein, 22 aa, Artificial Sequence
  Cyclic GFR-binding peptide
  MOD_RES (16)..(17): Xaa is C or S
GVIKRIQVPRLDQPVXXPSASA

SEQ ID NO: 11319 - protein, 23 aa, Artificial Sequence
  Cyclic GFR-binding peptide
  MOD_RES (17)..(18): Xaa is C or S
SDDMIQVTINSLQTPAXXPKPVT

SEQ ID NO: 11320 - protein, 17 aa, Artificial Sequence
  Cyclic GFR-binding peptide
IKPTKGIIKRIQVPRLD

SEQ ID NO: 11321 - protein, 20 aa, Artificial Sequence
  Cyclic GFR-binding peptide
  MOD_RES (14)..(15): Xaa is C or S
MIQVTINSLKTPAXXPKPVY

SEQ ID NO: 11322 - protein, 18 aa, Artificial Sequence
  Cyclic GFR-binding peptide
  MOD_RES (14)..(15): Xaa is C or S
IKRIQVPRLDQPVXXPSA

SEQ ID NO: 11323 - protein, 17 aa, Artificial Sequence
  Cyclic GFR-binding peptide
  MOD_RES (16)..(16): Xaa is C or S
YYLVTLPELQVQTPRXQ

SEQ ID NO: 11324 - protein, 23 aa, Artificial Sequence
  Cyclic GFR-binding peptide
  MOD_RES (17)..(17): Xaa is C or S
SDDIKRVQVPRLKTPAXTPKTVH

SEQ ID NO: 11325 - protein, 18 aa, Artificial Sequence
  Cyclic GFR-binding peptide
  MOD_RES (16)..(16): Xaa is C or S
YYLVTLPELQVQTPRXQV

SEQ ID NO: 11326 - protein, 23 aa, Artificial Sequence
  Cyclic GFR-binding peptide
  MOD_RES (17)..(18): Xaa is C or S
NEDIKRMQVPRLETPVXXAKPIK

SEQ ID NO: 11327 - protein, 18 aa, Artificial Sequence
  Cyclic GFR-binding peptide
IVNSSDDMIQVTINSLKT

SEQ ID NO: 11328 - protein, 20 aa, Artificial Sequence
  Cyclic GFR-binding peptide
  MOD_RES (16)..(16): Xaa is C or S
YYLVTLPELQVQTPRXQVNR

SEQ ID NO: 11329 - protein, 16 aa, Artificial Sequence
  Cyclic GFR-binding peptide
VKPTRGVVKAIKVSRL

SEQ ID NO: 11330 - protein, 22 aa, Artificial Sequence
  Cyclic GFR-binding peptide
  MOD_RES (16)..(17): Xaa is C or S
DDMIQVTINSLKTPAXXPKPVY

SEQ ID NO: 11331 - protein, 17 aa, Artificial Sequence
  Cyclic GFR-binding peptide
HQGQHPKIRYYLMTLPE

SEQ ID NO: 11332 - protein, 14 aa, Artificial Sequence
  Cyclic GFR-binding peptide
  MOD_RES (14)..(14): Xaa is C or S
MIQVTINSLQTPAX

SEQ ID NO: 11333 - protein, 18 aa, Artificial Sequence
  Cyclic GFR-binding peptide
IVNSSDDMIQVTINSLQT

SEQ ID NO: 11334 - protein, 27 aa, Artificial Sequence
  Cyclic GFR-binding peptide
  MOD_RES (21)..(22): Xaa is C or S
VKPTRGVMIQITINSLDQPVXXPSASA

SEQ ID NO: 11335 - protein, 19 aa, Artificial Sequence
  Cyclic GFR-binding peptide
  MOD_RES (14)..(15): Xaa is C or S
MIQITINSLDQPVXXPSAS

SEQ ID NO: 11336 - protein, 16 aa, Artificial Sequence
  Cyclic GFR-binding peptide
VKPTRGVIKRIQVPRL

SEQ ID NO: 11337 - protein, 17 aa, Artificial Sequence
  Cyclic GFR-binding peptide
  MOD_RES (14)..(15): Xaa is C or S
VKAIKVSRLAQPVXXPA

SEQ ID NO: 11338 - protein, 13 aa, Artificial Sequence
  Cyclic GFR-binding peptide
YYLVTLPEHHVRS

SEQ ID NO: 11339 - protein, 19 aa, Artificial Sequence
  Cyclic GFR-binding peptide
  MOD_RES (14)..(15): Xaa is C or S
MIQVTINSLQTPAXXPKPV

SEQ ID NO: 11340 - protein, 22 aa, Artificial Sequence
  Cyclic GFR-binding peptide
  MOD_RES (16)..(17): Xaa is C or S
DDVKAVKVSRLKTPAXXPKPVY

SEQ ID NO: 11341 - protein, 27 aa, Artificial Sequence
  Cyclic GFR-binding peptide
  MOD_RES (21)..(22): Xaa is C or S
VKPTRGVIKRIQVPRLDQPVXXPSASA

SEQ ID NO: 11342 - protein, 22 aa, Artificial Sequence
  Cyclic GFR-binding peptide
  MOD_RES (16)..(17): Xaa is C or S
GVVKAIKVSRLDQPVXXPSASA

SEQ ID NO: 11343 - protein, 20 aa, Artificial Sequence
  Cyclic GFR-binding peptide
  MOD_RES (14)..(15): Xaa is C or S
IKRVQVPRLQTPAXXPKPVT

SEQ ID NO: 11344 - protein, 16 aa, Artificial Sequence
  Cyclic GFR-binding peptide
  MOD_RES (14)..(15): Xaa is C or S
MIQVTINSLKTPAXXP

SEQ ID NO: 11345 - protein, 19 aa, Artificial Sequence
  Cyclic GFR-binding peptide
  MOD_RES (14)..(15): Xaa is C or S
IKRVQVPRLQTPAXXPKPV

SEQ ID NO: 11346 - protein, 20 aa, Artificial Sequence
  Cyclic GFR-binding peptide
  MOD_RES (16)..(16): Xaa is C or S
YYLVTLPEHHVRSPQXKVSS

SEQ ID NO: 11347 - protein, 26 aa, Artificial Sequence
  Cyclic GFR-binding peptide
  MOD_RES (20)..(21): Xaa is C or S
VNSSDDVKAVKVSRLQTPAXXPKPVT

SEQ ID NO: 11348 - protein, 15 aa, Artificial Sequence
  Cyclic GFR-binding peptide
  MOD_RES (14)..(15): Xaa is C or S
MIQVTINSLQTPAXX

SEQ ID NO: 11349 - protein, 16 aa, Artificial Sequence
  Cyclic GFR-binding peptide
VKPKRGVIKRIQVPRL

SEQ ID NO: 11350 - protein, 16 aa, Artificial Sequence
  Cyclic GFR-binding peptide
  MOD_RES (14)..(15): Xaa is C or S
IKRIQVPRLDQSVXXP

SEQ ID NO: 11351 - protein, 13 aa, Artificial Sequence
  Cyclic GFR-binding peptide
MIQITINSLDQSV

SEQ ID NO: 11352 - protein, 27 aa, Artificial Sequence
  Cyclic GFR-binding peptide
  MOD_RES (21)..(21): Xaa is C or S
IVNSSDDVKAVKVSRLKTPAXTPKTVH

SEQ ID NO: 11353 - protein, 18 aa, Artificial Sequence
  Cyclic GFR-binding peptide
  MOD_RES (16)..(16): Xaa is C or S
YYVVPLPELQVQTPRXQV

SEQ ID NO: 11354 - protein, 19 aa, Artificial Sequence
  Cyclic GFR-binding peptide
  MOD_RES (16)..(16): Xaa is C or S
YYVVPLPEHHVRSPQXKVS

SEQ ID NO: 11355 - protein, 25 aa, Artificial Sequence
  Cyclic GFR-binding peptide
  MOD_RES (19)..(19): Xaa is C or S
HPKIRYYVMPLPEEETPVXELGEDN

SEQ ID NO: 11356 - protein, 15 aa, Artificial Sequence
  Cyclic GFR-binding peptide
VVKENEDIKRMQVPR

SEQ ID NO: 11357 - protein, 23 aa, Artificial Sequence
  Cyclic GFR-binding peptide
  MOD_RES (17)..(18): Xaa is C or S
SDDIKRVQVPRLQTPAXXPKPVT

SEQ ID NO: 11358 - protein, 19 aa, Artificial Sequence
  Cyclic GFR-binding peptide
IVNSSDDIKRVQVPRLKTP

SEQ ID NO: 11359 - protein, 18 aa, Artificial Sequence
  Cyclic GFR-binding peptide
  MOD_RES (14)..(15): Xaa is C or S
MIQITINSLDQPVXXPSA

SEQ ID NO: 11360 - protein, 19 aa, Artificial Sequence
  Cyclic GFR-binding peptide
IVNSSDDIKRVQVPRLQTP

SEQ ID NO: 11361 - protein, 16 aa, Artificial Sequence
  Cyclic GFR-binding peptide
  MOD_RES (14)..(14): Xaa is C or S
MIQVTINSLKTPAXTP

SEQ ID NO: 11362 - protein, 16 aa, Artificial Sequence
  Cyclic GFR-binding peptide
VVKDYEDMIQMTINSL

SEQ ID NO: 11363 - protein, 18 aa, Artificial Sequence
  Cyclic GFR-binding peptide
HQGQHPKIRYYLMTLPEE

SEQ ID NO: 11364 - protein, 22 aa, Artificial Sequence
  Cyclic GFR-binding peptide
  MOD_RES (16)..(17): Xaa is C or S
DDIKRVQVPRLKTPAXXPKPVY

SEQ ID NO: 11365 - protein, 13 aa, Artificial Sequence
  Cyclic GFR-binding peptide
IKRIQVPRLAQPV

SEQ ID NO: 11366 - protein, 26 aa, Artificial Sequence
  Cyclic GFR-binding peptide
  MOD_RES (20)..(21): Xaa is C or S
VKENEDMIQMTINSLETPVXXAKPIK

SEQ ID NO: 11367 - protein, 17 aa, Artificial Sequence
  Cyclic GFR-binding peptide
VVKDYEDVKAMKVSRLE

SEQ ID NO: 11368 - protein, 23 aa, Artificial Sequence
  Cyclic GFR-binding peptide
  MOD_RES (17)..(18): Xaa is C or S
SDDIKRVQVPRLKTPAXXPKPVY

SEQ ID NO: 11369 - protein, 19 aa, Artificial Sequence
  Cyclic GFR-binding peptide
  MOD_RES (14)..(15): Xaa is C or S
MIQVTINSLKTPAXXPKPV

SEQ ID NO: 11370 - protein, 23 aa, Artificial Sequence
  Cyclic GFR-binding peptide
  MOD_RES (17)..(18): Xaa is C or S
RGVVKAIKVSRLDQPVXXPSASA

SEQ ID NO: 11371 - protein, 18 aa, Artificial Sequence
  Cyclic GFR-binding peptide
  MOD_RES (14)..(15): Xaa is C or S
VKAVKVSRLQTPAXXPKP

SEQ ID NO: 11372 - protein, 19 aa, Artificial Sequence
  Cyclic GFR-binding peptide
IVNSSDDMIQVTINSLKTP

SEQ ID NO: 11373 - protein, 27 aa, Artificial Sequence
  Cyclic GFR-binding peptide
  MOD_RES (21)..(22): Xaa is C or S
IVNSSDDIKRVQVPRLQTPAXXPKPVT

SEQ ID NO: 11374 - protein, 17 aa, Artificial Sequence
  Cyclic GFR-binding peptide
VVKDYEDIKRMQVPRLE

SEQ ID NO: 11375 - protein, 19 aa, Artificial Sequence
  Cyclic GFR-binding peptide
IVNSSDDMIQVTINSLQTP

SEQ ID NO: 11376 - protein, 20 aa, Artificial Sequence
  Cyclic GFR-binding peptide
  MOD_RES (14)..(15): Xaa is C or S
MIQITINSLDQSVXXPSASA

SEQ ID NO: 11377 - protein, 27 aa, Artificial Sequence
  Cyclic GFR-binding peptide
  MOD_RES (21)..(22): Xaa is C or S
VVKDYEDVKAMKVSRLETPVXXAKPIS

SEQ ID NO: 11378 - protein, 20 aa, Artificial Sequence
  Cyclic GFR-binding peptide
  MOD_RES (14)..(14): Xaa is C or S
IKRVQVPRLKTPAXTPKTVH

SEQ ID NO: 11379 - protein, 29 aa, Artificial Sequence
  Cyclic GFR-binding peptide
  MOD_RES (25)..(25): Xaa is C or S
FIPKKRVIEYYLVTLPELQVQTPRXQVNR

SEQ ID NO: 11380 - protein, 26 aa, Artificial Sequence
  Cyclic GFR-binding peptide
  MOD_RES (20)..(21): Xaa is C or S
KPKRGVMIQITINSLAQPVXXPAASA

SEQ ID NO: 11381 - protein, 16 aa, Artificial Sequence
  Cyclic GFR-binding peptide
  MOD_RES (14)..(15): Xaa is C or S
IKRVQVPRLQTPAXXP

SEQ ID NO: 11382 - protein, 24 aa, Artificial Sequence
  Cyclic GFR-binding peptide
  MOD_RES (18)..(19): Xaa is C or S
TKGIIKRIQVPRLDQSVXXPSASA

SEQ ID NO: 11383 - protein, 16 aa, Artificial Sequence
  Cyclic GFR-binding peptide
VKPKRGVVKAIKVSRL

SEQ ID NO: 11384 - protein, 17 aa, Artificial Sequence
  Cyclic GFR-binding peptide
  MOD_RES (16)..(16): Xaa is C or S
YYVVPLPELQVQTPRXQ

SEQ ID NO: 11385 - protein, 25 aa, Artificial Sequence
  Cyclic GFR-binding peptide
  MOD_RES (19)..(20): Xaa is C or S
NSSDDIKRVQVPRLQTPAXXPKPVT

SEQ ID NO: 11386 - protein, 17 aa, Artificial Sequence
  Cyclic GFR-binding peptide
IKPTKGIMIQITINSLD

SEQ ID NO: 11387 - protein, 15 aa, Artificial Sequence
  Cyclic GFR-binding peptide
  MOD_RES (14)..(14): Xaa is C or S
IKRVQVPRLKTPAXT

SEQ ID NO: 11388 - protein, 14 aa, Artificial Sequence
  Cyclic GFR-binding peptide
  MOD_RES (14)..(14): Xaa is C or S
VKAIKVSRLDQPVX

SEQ ID NO: 11389 - protein, 18 aa, Artificial Sequence
  Cyclic GFR-binding peptide
FIPKKRVIEYYVVPLPEL

SEQ ID NO: 11390 - protein, 27 aa, Artificial Sequence
  Cyclic GFR-binding peptide
  MOD_RES (21)..(22): Xaa is C or S
IVNSSDDVKAVKVSRLQTPAXXPKPVT

SEQ ID NO: 11391 - protein, 29 aa, Artificial Sequence
  Cyclic GFR-binding peptide
  MOD_RES (25)..(25): Xaa is C or S
LKPKKRVYEYYVVPLPEHHVRSPQXKVSS

SEQ ID NO: 11392 - protein, 13 aa, Artificial Sequence
  Cyclic GFR-binding peptide
MIQITINSLAQPV

SEQ ID NO: 11393 - protein, 21 aa, Artificial Sequence
  Cyclic GFR-binding peptide
FIPKKRVIEYYVVPLPELQVQ

SEQ ID NO: 11394 - protein, 14 aa, Artificial Sequence
  Cyclic GFR-binding peptide
  MOD_RES (14)..(14): Xaa is C or S
IKRVQVPRLQTPAX

SEQ ID NO: 11395 - protein, 20 aa, Artificial Sequence
  Cyclic GFR-binding peptide
LKPKKRVYEYYLVTLPEHHV

SEQ ID NO: 11396 - protein, 19 aa, Artificial Sequence
  Cyclic GFR-binding peptide
  MOD_RES (14)..(15): Xaa is C or S
IKRIQVPRLAQPVXXPAAS

SEQ ID NO: 11397 - protein, 15 aa, Artificial Sequence
  Cyclic GFR-binding peptide
VVKDYEDIKRMQVPR

SEQ ID NO: 11398 - protein, 23 aa, Artificial Sequence
  Cyclic GFR-binding peptide
  MOD_RES (17)..(18): Xaa is C or S
NEDMIQMTINSLETPVXXAKPIK

SEQ ID NO: 11399 - protein, 16 aa, Artificial Sequence
  Cyclic GFR-binding peptide
IKPTKGIVKAIKVSRL

SEQ ID NO: 11400 - protein, 26 aa, Artificial Sequence
  Cyclic GFR-binding peptide
  MOD_RES (20)..(21): Xaa is C or S
VNSSDDMIQVTINSLQTPAXXPKPVT

SEQ ID NO: 11401 - protein, 23 aa, Artificial Sequence
  Cyclic GFR-binding peptide
  MOD_RES (19)..(19): Xaa is C or S
VIEYYLVTLPELQVQTPRXQVNR

SEQ ID NO: 11402 - protein, 17 aa, Artificial Sequence
  Cyclic GFR-binding peptide
LKPKKRVYEYYVVPLPE

SEQ ID NO: 11403 - protein, 21 aa, Artificial Sequence
  Cyclic GFR-binding peptide
  MOD_RES (15)..(15): Xaa is C or S
RYYVMPLPEEETPVXELGEDN

SEQ ID NO: 11404 - protein, 21 aa, Artificial Sequence
  Cyclic GFR-binding peptide
  MOD_RES (15)..(16): Xaa is C or S
DIKRVQVPRLQTPAXXPKPVT

SEQ ID NO: 11405 - protein, 20 aa, Artificial Sequence
  Cyclic GFR-binding peptide
  MOD_RES (14)..(15): Xaa is C or S
IKRMQVPRLETPVXXAKPIS

SEQ ID NO: 11406 - protein, 19 aa, Artificial Sequence
  Cyclic GFR-binding peptide
LKPKKRVYEYYVVPLPEHH

SEQ ID NO: 11407 - protein, 15 aa, Artificial Sequence
  Cyclic GFR-binding peptide
VKPTRGVVKAIKVSR

SEQ ID NO: 11408 - protein, 22 aa, Artificial Sequence
  Cyclic GFR-binding peptide
  MOD_RES (16)..(16): Xaa is C or S
IRYYVMPLPEEETPVXELGEDN

SEQ ID NO: 11409 - protein, 22 aa, Artificial Sequence
  Cyclic GFR-binding peptide
  MOD_RES (16)..(17): Xaa is C or S
DDIKRVQVPRLQTPAXXPKPVT

SEQ ID NO: 11410 - protein, 15 aa, Artificial Sequence
  Cyclic GFR-binding peptide
IVNSSDDVKAVKVSR

SEQ ID NO: 11411 - protein, 25 aa, Artificial Sequence
  Cyclic GFR-binding peptide
  MOD_RES (19)..(20): Xaa is C or S
KENEDIKRMQVPRLETPVXXAKPIK

SEQ ID NO: 11412 - protein, 21 aa, Artificial Sequence
  Cyclic GFR-binding peptide
  MOD_RES (15)..(16): Xaa is C or S
DIKRMQVPRLETPVXXAKPIS

SEQ ID NO: 11413 - protein, 15 aa, Artificial Sequence
  Cyclic GFR-binding peptide
  MOD_RES (14)..(15): Xaa is C or S
IKRVQVPRLKTPAXX

SEQ ID NO: 11414 - protein, 18 aa, Artificial Sequence
  Cyclic GFR-binding peptide
VKPKRGVIKRIQVPRLAQ

SEQ ID NO: 11415 - protein, 19 aa, Artificial Sequence
  Cyclic GFR-binding peptide
  MOD_RES (14)..(14): Xaa is C or S
MIQVTINSLKTPAXTPKTV

SEQ ID NO: 11416 - protein, 23 aa, Artificial Sequence
  Cyclic GFR-binding peptide
  MOD_RES (17)..(17): Xaa is C or S
SDDMIQVTINSLKTPAXTPKTVH

SEQ ID NO: 11417 - protein, 19 aa, Artificial Sequence
  Cyclic GFR-binding peptide
VKPTRGVMIQITINSLDQP

SEQ ID NO: 11418 - protein, 25 aa, Artificial Sequence
  Cyclic GFR-binding peptide
  MOD_RES (19)..(20): Xaa is C or S
PTRGVIKRIQVPRLDQPVXXPSASA

SEQ ID NO: 11419 - protein, 24 aa, Artificial Sequence
  Cyclic GFR-binding peptide
  MOD_RES (18)..(19): Xaa is C or S
SSDDVKAVKVSRLQTPAXXPKPVT

SEQ ID NO: 11420 - protein, 22 aa, Artificial Sequence
  Cyclic GFR-binding peptide
  MOD_RES (16)..(17): Xaa is C or S
DDVKAVKVSRLQTPAXXPKPVT

SEQ ID NO: 11421 - protein, 18 aa, Artificial Sequence
  Cyclic GFR-binding peptide
  MOD_RES (14)..(15): Xaa is C or S
IKRMQVPRLETPVXXAKP

SEQ ID NO: 11422 - protein, 21 aa, Artificial Sequence
  Cyclic GFR-binding peptide
  MOD_RES (15)..(16): Xaa is C or S
DMIQVTINSLKTPAXXPKPVY

SEQ ID NO: 11423 - protein, 20 aa, Artificial Sequence
  Cyclic GFR-binding peptide
HQGQHPKIRYYLMTLPEEET

SEQ ID NO: 11424 - protein, 20 aa, Artificial Sequence
  Cyclic GFR-binding peptide
  MOD_RES (14)..(15): Xaa is C or S
MIQMTINSLETPVXXAKPIK

SEQ ID NO: 11425 - protein, 18 aa, Artificial Sequence
  Cyclic GFR-binding peptide
  MOD_RES (14)..(15): Xaa is C or S
IKRIQVPRLDQSVXXPSA

SEQ ID NO: 11426 - protein, 15 aa, Artificial Sequence
  Cyclic GFR-binding peptide
  MOD_RES (14)..(15): Xaa is C or S
MIQVTINSLKTPAXX

SEQ ID NO: 11427 - protein, 20 aa, Artificial Sequence
  Cyclic GFR-binding peptide
  MOD_RES (14)..(15): Xaa is C or S
IKRIQVPRLDQSVXXPSASA

SEQ ID NO: 11428 - protein, 13 aa, Artificial Sequence
  Cyclic GFR-binding peptide
MIQITINSLDQPV

SEQ ID NO: 11429 - protein, 20 aa, Artificial Sequence
  Cyclic GFR-binding peptide
  MOD_RES (16)..(16): Xaa is C or S
YYVVPLPELQVQTPRXQVNR

SEQ ID NO: 11430 - protein, 19 aa, Artificial Sequence
  Cyclic GFR-binding peptide
  MOD_RES (14)..(15): Xaa is C or S
IKRVQVPRLKTPAXXPKPV

SEQ ID NO: 11431 - protein, 22 aa, Artificial Sequence
  Cyclic GFR-binding peptide
  MOD_RES (16)..(17): Xaa is C or S
DDMIQVTINSLQTPAXXPKPVT

SEQ ID NO: 11432 - protein, 17 aa, Artificial Sequence
  Cyclic GFR-binding peptide
VKPKRGVVKAIKVSRLA

SEQ ID NO: 11433 - protein, 17 aa, Artificial Sequence
  Cyclic GFR-binding peptide
  MOD_RES (14)..(14): Xaa is C or S
VKAVKVSRLKTPAXTPK

SEQ ID NO: 11434 - protein, 23 aa, Artificial Sequence
  Cyclic GFR-binding peptide
  MOD_RES (17)..(17): Xaa is C or S
KIRYYVMPLPEEETPVXELGEDN

SEQ ID NO: 11435 - protein, 22 aa, Artificial Sequence
  Cyclic GFR-binding peptide
  MOD_RES (16)..(17): Xaa is C or S
GVMIQITINSLDQPVXXPSASA

SEQ ID NO: 11436 - protein, 21 aa, Artificial Sequence
  Cyclic GFR-binding peptide
  MOD_RES (15)..(16): Xaa is C or S
DVKAMKVSRLETPVXXAKPIS

SEQ ID NO: 11437 - protein, 20 aa, Artificial Sequence
  Cyclic GFR-binding peptide
  MOD_RES (14)..(15): Xaa is C or S
IKRMQVPRLETPVXXAKPIK

SEQ ID NO: 11438 - protein, 18 aa, Artificial Sequence
  Cyclic GFR-binding peptide
  MOD_RES (14)..(15): Xaa is C or S
MIQITINSLDQSVXXPSA

SEQ ID NO: 11439 - protein, 26 aa, Artificial Sequence
  Cyclic GFR-binding peptide
  MOD_RES (20)..(21): Xaa is C or S
VKENEDVKAMKVSRLETPVXXAKPIK

SEQ ID NO: 11440 - protein, 24 aa, Artificial Sequence
  Cyclic GFR-binding peptide
  MOD_RES (18)..(19): Xaa is C or S
SSDDMIQVTINSLQTPAXXPKPVT

SEQ ID NO: 11441 - protein, 26 aa, Artificial Sequence
  Cyclic GFR-binding peptide
  MOD_RES (22)..(22): Xaa is C or S
KKRVYEYYLVTLPEHHVRSPQXKVSS

SEQ ID NO: 11442 - protein, 17 aa, Artificial Sequence
  Cyclic GFR-binding peptide
  MOD_RES (14)..(15): Xaa is C or S
IKRMQVPRLETPVXXAK

SEQ ID NO: 11443 - protein, 15 aa, Artificial Sequence
  Cyclic GFR-binding peptide
  MOD_RES (14)..(14): Xaa is C or S
YYVMPLPEEETPVXE

SEQ ID NO: 11444 - protein, 21 aa, Artificial Sequence
  Cyclic GFR-binding peptide
  MOD_RES (15)..(16): Xaa is C or S
IIKRIQVPRLDQSVXXPSASA

SEQ ID NO: 11445 - protein, 21 aa, Artificial Sequence
  Cyclic GFR-binding peptide
  MOD_RES (15)..(16): Xaa is C or S
DVKAVKVSRLQTPAXXPKPVT

SEQ ID NO: 11446 - protein, 21 aa, Artificial Sequence
  Cyclic GFR-binding peptide
  MOD_RES (15)..(16): Xaa is C or S
VVKAIKVSRLDQPVXXPSASA

SEQ ID NO: 11447 - protein, 17 aa, Artificial Sequence
  Cyclic GFR-binding peptide
  MOD_RES (16)..(16): Xaa is C or S
YYLVTLPEHHVRSPQXK

SEQ ID NO: 11448 - protein, 25 aa, Artificial Sequence
  Cyclic GFR-binding peptide
  MOD_RES (21)..(21): Xaa is C or S
KRVYEYYLVTLPEHHVRSPQXKVSS

SEQ ID NO: 11449 - protein, 17 aa, Artificial Sequence
  Cyclic GFR-binding peptide
VVKENEDVKAMKVSRLE

SEQ ID NO: 11450 - protein, 17 aa, Artificial Sequence
  Cyclic GFR-binding peptide
FIPKKRVIEYYLVTLPE

SEQ ID NO: 11451 - protein, 15 aa, Artificial Sequence
  Cyclic GFR-binding peptide
  MOD_RES (14)..(15): Xaa is C or S
IKRVQVPRLQTPAXX

SEQ ID NO: 11452 - protein, 19 aa, Artificial Sequence
  Cyclic GFR-binding peptide
VKPKRGVVKAIKVSRLAQP

SEQ ID NO: 11453 - protein, 13 aa, Artificial Sequence
  Cyclic GFR-binding peptide
VKAMKVSRLETPV

SEQ ID NO: 11454 - protein, 27 aa, Artificial Sequence
  Cyclic GFR-binding peptide
  MOD_RES (21)..(22): Xaa is C or S
VVKENEDMIQMTINSLETPVXXAKPIK

SEQ ID NO: 11455 - protein, 22 aa, Artificial Sequence
  Cyclic GFR-binding peptide
  MOD_RES (16)..(17): Xaa is C or S
GIIKRIQVPRLDQSVXXPSASA

SEQ ID NO: 11456 - protein, 27 aa, Artificial Sequence
  Cyclic GFR-binding peptide
  MOD_RES (23)..(23): Xaa is C or S
PKKRVYEYYVVPLPEHHVRSPQXKVSS

SEQ ID NO: 11457 - protein, 19 aa, Artificial Sequence
  Cyclic GFR-binding peptide
  MOD_RES (16)..(16): Xaa is C or S
YYLVTLPEHHVRSPQXKVS

SEQ ID NO: 11458 - protein, 19 aa, Artificial Sequence
  Cyclic GFR-binding peptide
VVKENEDMIQMTINSLETP

SEQ ID NO: 11459 - protein, 17 aa, Artificial Sequence
  Cyclic GFR-binding peptide
VKPTRGVMIQITINSLD

SEQ ID NO: 11460 - protein, 16 aa, Artificial Sequence
  Cyclic GFR-binding peptide
  MOD_RES (14)..(15): Xaa is C or S
MIQVTINSLQTPAXXP

SEQ ID NO: 11461 - protein, 20 aa, Artificial Sequence
  Cyclic GFR-binding peptide
  MOD_RES (14)..(14): Xaa is C or S
MIQVTINSLKTPAXTPKTVH

SEQ ID NO: 11462 - protein, 14 aa, Artificial Sequence
  Cyclic GFR-binding peptide
  MOD_RES (14)..(14): Xaa is C or S
IKRVQVPRLKTPAX

SEQ ID NO: 11463 - protein, 17 aa, Artificial Sequence
  Cyclic GFR-binding peptide
IVNSSDDMIQVTINSLQ

SEQ ID NO: 11464 - protein, 17 aa, Artificial Sequence
  Cyclic GFR-binding peptide
HQGQHPKIRYYVMPLPE

SEQ ID NO: 11465 - protein, 15 aa, Artificial Sequence
  Cyclic GFR-binding peptide
IKPTKGIVKAIKVSR

SEQ ID NO: 11466 - protein, 26 aa, Artificial Sequence
  Cyclic GFR-binding peptide
  MOD_RES (20)..(20): Xaa is C or S
QHPKIRYYVMPLPEEETPVXELGEDN

SEQ ID NO: 11467 - protein, 15 aa, Artificial Sequence
  Cyclic GFR-binding peptide
  MOD_RES (14)..(14): Xaa is C or S
VKAVKVSRLKTPAXT

SEQ ID NO: 11468 - protein, 26 aa, Artificial Sequence
  Cyclic GFR-binding peptide
  MOD_RES (20)..(20): Xaa is C or S
VNSSDDMIQVTINSLKTPAXTPKTVH

SEQ ID NO: 11469 - protein, 22 aa, Artificial Sequence
  Cyclic GFR-binding peptide
  MOD_RES (16)..(17): Xaa is C or S
GIVKAIKVSRLDQSVXXPSASA

SEQ ID NO: 11470 - protein, 26 aa, Artificial Sequence
  Cyclic GFR-binding peptide
  MOD_RES (20)..(21): Xaa is C or S
VNSSDDMIQVTINSLKTPAXXPKPVY

SEQ ID NO: 11471 - protein, 24 aa, Artificial Sequence
  Cyclic GFR-binding peptide
  MOD_RES (18)..(19): Xaa is C or S
DYEDVKAMKVSRLETPVXXAKPIS

SEQ ID NO: 11472 - protein, 19 aa, Artificial Sequence
  Cyclic GFR-binding peptide
  MOD_RES (14)..(14): Xaa is C or S
IKRVQVPRLKTPAXTPKTV

SEQ ID NO: 11473 - protein, 20 aa, Artificial Sequence
  Cyclic GFR-binding peptide
  MOD_RES (14)..(15): Xaa is C or S
MIQITINSLAQPVXXPAASA

SEQ ID NO: 11474 - protein, 16 aa, Artificial Sequence
  Cyclic GFR-binding peptide
  MOD_RES (14)..(15): Xaa is C or S
VKAIKVSRLDQSVXXP

SEQ ID NO: 11475 - protein, 23 aa, Artificial Sequence
  Cyclic GFR-binding peptide
  MOD_RES (17)..(18): Xaa is C or S
RGVVKAIKVSRLAQPVXXPAASA

SEQ ID NO: 11476 - protein, 18 aa, Artificial Sequence
  Cyclic GFR-binding peptide
IKPTKGIIKRIQVPRLDQ

SEQ ID NO: 11477 - protein, 17 aa, Artificial Sequence
  Cyclic GFR-binding peptide
IVNSSDDMIQVTINSLK

SEQ ID NO: 11478 - protein, 22 aa, Artificial Sequence
  Cyclic GFR-binding peptide
  MOD_RES (16)..(16): Xaa is C or S
IRYYLMTLPEEETPVXELGEDN

SEQ ID NO: 11479 - protein, 27 aa, Artificial Sequence
  Cyclic GFR-binding peptide
  MOD_RES (21)..(21): Xaa is C or S
GQHPKIRYYLMTLPEEETPVXELGEDN

SEQ ID NO: 11480 - protein, 24 aa, Artificial Sequence
  Cyclic GFR-binding peptide
  MOD_RES (18)..(19): Xaa is C or S
KRGVIKRIQVPRLAQPVXXPAASA

SEQ ID NO: 11481 - protein, 20 aa, Artificial Sequence
  Cyclic GFR-binding peptide
  MOD_RES (14)..(14): Xaa is C or S
VKAVKVSRLKTPAXTPKTVH

SEQ ID NO: 11482 - protein, 13 aa, Artificial Sequence
  Cyclic GFR-binding peptide
VKAVKVSRLKTPA

SEQ ID NO: 11483 - protein, 16 aa, Artificial Sequence
  Cyclic GFR-binding peptide
VVKENEDIKRMQVPRL

SEQ ID NO: 11484 - protein, 25 aa, Artificial Sequence
  Cyclic GFR-binding peptide
  MOD_RES (19)..(20): Xaa is C or S
PKRGVVKAIKVSRLAQPVXXPAASA

SEQ ID NO: 11485 - protein, 26 aa, Artificial Sequence
  Cyclic GFR-binding peptide
  MOD_RES (20)..(21): Xaa is C or S
KPTRGVVKAIKVSRLDQPVXXPSASA

SEQ ID NO: 11486 - protein, 15 aa, Artificial Sequence
  Cyclic GFR-binding peptide
YYLVTLPELQVQTPR

SEQ ID NO: 11487 - protein, 25 aa, Artificial Sequence
  Cyclic GFR-binding peptide
  MOD_RES (19)..(20): Xaa is C or S
PKRGVMIQITINSLAQPVXXPAASA

SEQ ID NO: 11488 - protein, 18 aa, Artificial Sequence
  Cyclic GFR-binding peptide
  MOD_RES (14)..(15): Xaa is C or S
MIQVTINSLQTPAXXPKP

SEQ ID NO: 11489 - protein, 25 aa, Artificial Sequence
  Cyclic GFR-binding peptide
  MOD_RES (19)..(20): Xaa is C or S
NSSDDIKRVQVPRLKTPAXXPKPVY

SEQ ID NO: 11490 - protein, 22 aa, Artificial Sequence
  Cyclic GFR-binding peptide
  MOD_RES (18)..(18): Xaa is C or S
IEYYLVTLPELQVQTPRXQVNR

SEQ ID NO: 11491 - protein, 20 aa, Artificial Sequence
  Cyclic GFR-binding peptide
FIPKKRVIEYYLVTLPELQV

SEQ ID NO: 11492 - protein, 25 aa, Artificial Sequence
  Cyclic GFR-binding peptide
  MOD_RES (19)..(20): Xaa is C or S
KENEDMIQMTINSLETPVXXAKPIK

SEQ ID NO: 11493 - protein, 25 aa, Artificial Sequence
  Cyclic GFR-binding peptide
  MOD_RES (21)..(21): Xaa is C or S
KRVIEYYLVTLPELQVQTPRXQVNR

SEQ ID NO: 11494 - protein, 27 aa, Artificial Sequence
  Cyclic GFR-binding peptide
  MOD_RES (21)..(22): Xaa is C or S
VKPKRGVVKAIKVSRLAQPVXXPAASA

SEQ ID NO: 11495 - protein, 24 aa, Artificial Sequence
  Cyclic GFR-binding peptide
  MOD_RES (18)..(19): Xaa is C or S
SSDDIKRVQVPRLKTPAXXPKPVY

SEQ ID NO: 11496 - protein, 17 aa, Artificial Sequence
  Cyclic GFR-binding peptide
  MOD_RES (14)..(15): Xaa is C or S
IKRVQVPRLKTPAXXPK

SEQ ID NO: 11497 - protein, 17 aa, Artificial Sequence
  Cyclic GFR-binding peptide
  MOD_RES (16)..(16): Xaa is C or S
YYVVPLPEHHVRSPQXK

SEQ ID NO: 11498 - protein, 20 aa, Artificial Sequence
  Cyclic GFR-binding peptide
  MOD_RES (14)..(15): Xaa is C or S
IKRIQVPRLDQPVXXPSASA

SEQ ID NO: 11499 - protein, 15 aa, Artificial Sequence
  Cyclic GFR-binding peptide
VKPKRGVVKAIKVSR

SEQ ID NO: 11500 - protein, 16 aa, Artificial Sequence
  Cyclic GFR-binding peptide
  MOD_RES (14)..(15): Xaa is C or S
VKAIKVSRLAQPVXXP

SEQ ID NO: 11501 - protein, 17 aa, Artificial Sequence
  Cyclic GFR-binding peptide
  MOD_RES (14)..(15): Xaa is C or S
MIQMTINSLETPVXXAK

SEQ ID NO: 11502 - protein, 20 aa, Artificial Sequence
  Cyclic GFR-binding peptide
  MOD_RES (14)..(15): Xaa is C or S
IKRIQVPRLAQPVXXPAASA

SEQ ID NO: 11503 - protein, 23 aa, Artificial Sequence
  Cyclic GFR-binding peptide
  MOD_RES (17)..(18): Xaa is C or S
RGVMIQITINSLAQPVXXPAASA

SEQ ID NO: 11504 - protein, 15 aa, Artificial Sequence
  Cyclic GFR-binding peptide
  MOD_RES (14)..(15): Xaa is C or S
VKAVKVSRLKTPAXX

SEQ ID NO: 11505 - protein, 18 aa, Artificial Sequence
  Cyclic GFR-binding peptide
VVKDYEDIKRMQVPRLET

SEQ ID NO: 11506 - protein, 19 aa, Artificial Sequence
  Cyclic GFR-binding peptide
HQGQHPKIRYYLMTLPEEE

SEQ ID NO: 11507 - protein, 22 aa, Artificial Sequence
  Cyclic GFR-binding peptide
  MOD_RES (16)..(17): Xaa is C or S
EDVKAMKVSRLETPVXXAKPIS

SEQ ID NO: 11508 - protein, 22 aa, Artificial Sequence
  Cyclic GFR-binding peptide
  MOD_RES (16)..(16): Xaa is C or S
DDVKAVKVSRLKTPAXTPKTVH

SEQ ID NO: 11509 - protein, 16 aa, Artificial Sequence
  Cyclic GFR-binding peptide
IVNSSDDMIQVTINSL

SEQ ID NO: 11510 - protein, 27 aa, Artificial Sequence
  Cyclic GFR-binding peptide
  MOD_RES (21)..(22): Xaa is C or S
VKPKRGVMIQITINSLAQPVXXPAASA

SEQ ID NO: 11511 - protein, 27 aa, Artificial Sequence
  Cyclic GFR-binding peptide
  MOD_RES (21)..(22): Xaa is C or S
IKPTKGIIKRIQVPRLDQSVXXPSASA

SEQ ID NO: 11512 - protein, 19 aa, Artificial Sequence
  Cyclic GFR-binding peptide
VVKDYEDIKRMQVPRLETP

SEQ ID NO: 11513 - protein, 21 aa, Artificial Sequence
  Cyclic GFR-binding peptide
  MOD_RES (15)..(16): Xaa is C or S
VIKRIQVPRLDQPVXXPSASA

SEQ ID NO: 11514 - protein, 29 aa, Artificial Sequence
  Cyclic GFR-binding peptide
  MOD_RES (25)..(25): Xaa is C or S
LKPKKRVYEYYLVTLPEHHVRSPQXKVSS

SEQ ID NO: 11515 - protein, 20 aa, Artificial Sequence
  Cyclic GFR-binding peptide
  MOD_RES (14)..(14): Xaa is C or S
YYLMTLPEEETPVXELGEDN

SEQ ID NO: 11516 - protein, 28 aa, Artificial Sequence
  Cyclic GFR-binding peptide
  MOD_RES (22)..(22): Xaa is C or S
QGQHPKIRYYLMTLPEEETPVXELGEDN

SEQ ID NO: 11517 - protein, 26 aa, Artificial Sequence
  Cyclic GFR-binding peptide
  MOD_RES (20)..(21): Xaa is C or S
KPTKGIVKAIKVSRLDQSVXXPSASA

SEQ ID NO: 11518 - protein, 14 aa, Artificial Sequence
  Cyclic GFR-binding peptide
  MOD_RES (14)..(14): Xaa is C or S
MIQVTINSLKTPAX

SEQ ID NO: 11519 - protein, 16 aa, Artificial Sequence
  Cyclic GFR-binding peptide
IVNSSDDVKAVKVSRL

SEQ ID NO: 11520 - protein, 16 aa, Artificial Sequence
  Cyclic GFR-binding peptide
  MOD_RES (16)..(16): Xaa is C or S
YYVVPLPELQVQTPRX

SEQ ID NO: 11521 - protein, 17 aa, Artificial Sequence
  Cyclic GFR-binding peptide
IVNSSDDVKAVKVSRLK

SEQ ID NO: 11522 - protein, 17 aa, Artificial Sequence
  Cyclic GFR-binding peptide
IVNSSDDVKAVKVSRLQ

SEQ ID NO: 11523 - protein, 20 aa, Artificial Sequence
  Cyclic GFR-binding peptide
  MOD_RES (14)..(15): Xaa is C or S
VKAMKVSRLETPVXXAKPIK

SEQ ID NO: 11524 - protein, 18 aa, Artificial Sequence
  Cyclic GFR-binding peptide
VVKENEDVKAMKVSRLET

SEQ ID NO: 11525 - protein, 21 aa, Artificial Sequence
  Cyclic GFR-binding peptide
LKPKKRVYEYYVVPLPEHHVR

SEQ ID NO: 11526 - protein, 19 aa, Artificial Sequence
  Cyclic GFR-binding peptide
  MOD_RES (14)..(14): Xaa is C or S
YYLMTLPEEETPVXELGED

SEQ ID NO: 11527 - protein, 16 aa, Artificial Sequence
  Cyclic GFR-binding peptide
  MOD_RES (14)..(15): Xaa is C or S
VKAIKVSRLDQPVXXP

SEQ ID NO: 11528 - protein, 14 aa, Artificial Sequence
  Cyclic GFR-binding peptide
YYVVPLPELQVQTP

SEQ ID NO: 11529 - protein, 25 aa, Artificial Sequence
  Cyclic GFR-binding peptide
  MOD_RES (19)..(20): Xaa is C or S
NSSDDVKAVKVSRLKTPAXXPKPVY

SEQ ID NO: 11530 - protein, 18 aa, Artificial Sequence
  Cyclic GFR-binding peptide
  MOD_RES (16)..(16): Xaa is C or S
YYVVPLPEHHVRSPQXKV

SEQ ID NO: 11531 - protein, 21 aa, Artificial Sequence
  Cyclic GFR-binding peptide
  MOD_RES (17)..(17): Xaa is C or S
EYYVVPLPELQVQTPRXQVNR

SEQ ID NO: 11532 - protein, 16 aa, Artificial Sequence
  Cyclic GFR-binding peptide
  MOD_RES (16)..(16): Xaa is C or S
YYVVPLPEHHVRSPQX

SEQ ID NO: 11533 - protein, 19 aa, Artificial Sequence
  Cyclic GFR-binding peptide
  MOD_RES (14)..(15): Xaa is C or S
MIQITINSLDQSVXXPSAS

SEQ ID NO: 11534 - protein, 19 aa, Artificial Sequence
  Cyclic GFR-binding peptide
IKPTKGIMIQITINSLDQS

SEQ ID NO: 11535 - protein, 27 aa, Artificial Sequence
  Cyclic GFR-binding peptide
  MOD_RES (21)..(22): Xaa is C or S
VVKDYEDMIQMTINSLETPVXXAKPIS

SEQ ID NO: 11536 - protein, 18 aa, Artificial Sequence
  Cyclic GFR-binding peptide
VVKENEDMIQMTINSLET

SEQ ID NO: 11537 - protein, 25 aa, Artificial Sequence
  Cyclic GFR-binding peptide
  MOD_RES (19)..(20): Xaa is C or S
PKRGVIKRIQVPRLAQPVXXPAASA

SEQ ID NO: 11538 - protein, 25 aa, Artificial Sequence
  Cyclic GFR-binding peptide
  MOD_RES (19)..(20): Xaa is C or S
NSSDDMIQVTINSLKTPAXXPKPVY

SEQ ID NO: 11539 - protein, 15 aa, Artificial Sequence
  Cyclic GFR-binding peptide
VKPKRGVMIQITINS

SEQ ID NO: 11540 - protein, 26 aa, Artificial Sequence
  Cyclic GFR-binding peptide
  MOD_RES (22)..(22): Xaa is C or S
KKRVYEYYVVPLPEHHVRSPQXKVSS

SEQ ID NO: 11541 - protein, 18 aa, Artificial Sequence
  Cyclic GFR-binding peptide
  MOD_RES (14)..(14): Xaa is C or S
YYLMTLPEEETPVXELGE

SEQ ID NO: 11542 - protein, 18 aa, Artificial Sequence
  Cyclic GFR-binding peptide
  MOD_RES (14)..(15): Xaa is C or S
VKAVKVSRLKTPAXXPKP

SEQ ID NO: 11543 - protein, 15 aa, Artificial Sequence
  Cyclic GFR-binding peptide
YYLVTLPEHHVRSPQ

SEQ ID NO: 11544 - protein, 22 aa, Artificial Sequence
  Cyclic GFR-binding peptide
  MOD_RES (18)..(18): Xaa is C or S
IEYYVVPLPELQVQTPRXQVNR

SEQ ID NO: 11545 - protein, 17 aa, Artificial Sequence
  Cyclic GFR-binding peptide
VVKENEDIKRMQVPRLE

SEQ ID NO: 11546 - protein, 24 aa, Artificial Sequence
  Cyclic GFR-binding peptide
  MOD_RES (18)..(19): Xaa is C or S
DYEDMIQMTINSLETPVXXAKPIS

SEQ ID NO: 11547 - protein, 24 aa, Artificial Sequence
  Cyclic GFR-binding peptide
  MOD_RES (18)..(19): Xaa is C or S
TKGIMIQITINSLDQSVXXPSASA

SEQ ID NO: 11548 - protein, 29 aa, Artificial Sequence
  Cyclic GFR-binding peptide
  MOD_RES (23)..(23): Xaa is C or S
HQGQHPKIRYYLMTLPEEETPVXELGEDN

SEQ ID NO: 11549 - protein, 23 aa, Artificial Sequence
  Cyclic GFR-binding peptide
  MOD_RES (17)..(18): Xaa is C or S
RGVMIQITINSLDQPVXXPSASA

SEQ ID NO: 11550 - protein, 20 aa, Artificial Sequence
  Cyclic GFR-binding peptide
  MOD_RES (14)..(15): Xaa is C or S
MIQVTINSLQTPAXXPKPVT

SEQ ID NO: 11551 - protein, 24 aa, Artificial Sequence
  Cyclic GFR-binding peptide
  MOD_RES (18)..(19): Xaa is C or S
SSDDIKRVQVPRLQTPAXXPKPVT

SEQ ID NO: 11552 - protein, 19 aa, Artificial Sequence
  Cyclic GFR-binding peptide
IKPTKGIVKAIKVSRLDQS

SEQ ID NO: 11553 - protein, 26 aa, Artificial Sequence
  Cyclic GFR-binding peptide
  MOD_RES (20)..(21): Xaa is C or S
KPKRGVIKRIQVPRLAQPVXXPAASA

SEQ ID NO: 11554 - protein, 20 aa, Artificial Sequence
  Cyclic GFR-binding peptide
  MOD_RES (14)..(14): Xaa is C or S
YYVMPLPEEETPVXELGEDN

SEQ ID NO: 11555 - protein, 23 aa, Artificial Sequence
  Cyclic GFR-binding peptide
  MOD_RES (17)..(18): Xaa is C or S
KGIMIQITINSLDQSVXXPSASA

SEQ ID NO: 11556 - protein, 18 aa, Artificial Sequence
  Cyclic GFR-binding peptide
  MOD_RES (14)..(14): Xaa is C or S
YYVMPLPEEETPVXELGE

SEQ ID NO: 11557 - protein, 14 aa, Artificial Sequence
  Cyclic GFR-binding peptide
YYLVTLPEHHVRSP

SEQ ID NO: 11558 - protein, 15 aa, Artificial Sequence
  Cyclic GFR-binding peptide
YYVVPLPEHHVRSPQ

SEQ ID NO: 11559 - protein, 16 aa, Artificial Sequence
  Cyclic GFR-binding peptide
  MOD_RES (14)..(15): Xaa is C or S
VKAVKVSRLQTPAXXP

SEQ ID NO: 11560 - protein, 25 aa, Artificial Sequence
  Cyclic GFR-binding peptide
  MOD_RES (21)..(21): Xaa is C or S
KRVIEYYVVPLPELQVQTPRXQVNR

SEQ ID NO: 11561 - protein, 23 aa, Artificial Sequence
  Cyclic GFR-binding peptide
  MOD_RES (17)..(18): Xaa is C or S
SDDVKAVKVSRLQTPAXXPKPVT

SEQ ID NO: 11562 - protein, 24 aa, Artificial Sequence
  Cyclic GFR-binding peptide
  MOD_RES (18)..(19): Xaa is C or S
TRGVIKRIQVPRLDQPVXXPSASA

SEQ ID NO: 11563 - protein, 18 aa, Artificial Sequence
  Cyclic GFR-binding peptide
  MOD_RES (16)..(16): Xaa is C or S
YYLVTLPEHHVRSPQXKV

SEQ ID NO: 11564 - protein, 20 aa, Artificial Sequence
  Cyclic GFR-binding peptide
  MOD_RES (16)..(16): Xaa is C or S
YYVVPLPEHHVRSPQXKVSS

SEQ ID NO: 11565 - protein, 27 aa, Artificial Sequence
  Cyclic GFR-binding peptide
  MOD_RES (23)..(23): Xaa is C or S
PKKRVYEYYLVTLPEHHVRSPQXKVSS

SEQ ID NO: 11566 - protein, 16 aa, Artificial Sequence
  Cyclic GFR-binding peptide
  MOD_RES (14)..(15): Xaa is C or S
IKRIQVPRLDQPVXXP

SEQ ID NO: 11567 - protein, 28 aa, Artificial Sequence
  Cyclic GFR-binding peptide
  MOD_RES (24)..(24): Xaa is C or S
IPKKRVIEYYLVTLPELQVQTPRXQVNR

SEQ ID NO: 11568 - protein, 20 aa, Artificial Sequence
  Cyclic GFR-binding peptide
FIPKKRVIEYYVVPLPELQV

SEQ ID NO: 11569 - protein, 21 aa, Artificial Sequence
  Cyclic GFR-binding peptide
  MOD_RES (15)..(15): Xaa is C or S
DVKAVKVSRLKTPAXTPKTVH

SEQ ID NO: 11570 - protein, 20 aa, Artificial Sequence
  Cyclic GFR-binding peptide
  MOD_RES (14)..(15): Xaa is C or S
MIQITINSLDQPVXXPSASA

SEQ ID NO: 11571 - protein, 23 aa, Artificial Sequence
  Cyclic GFR-binding peptide
  MOD_RES (17)..(18): Xaa is C or S
YEDIKRMQVPRLETPVXXAKPIS

SEQ ID NO: 11572 - protein, 15 aa, Artificial Sequence
  Cyclic GFR-binding peptide
IKPTKGIMIQITINS

SEQ ID NO: 11573 - protein, 19 aa, Artificial Sequence
  Cyclic GFR-binding peptide
  MOD_RES (14)..(14): Xaa is C or S
YYVMPLPEEETPVXELGED

SEQ ID NO: 11574 - protein, 24 aa, Artificial Sequence
  Cyclic GFR-binding peptide
  MOD_RES (18)..(19): Xaa is C or S
TKGIVKAIKVSRLDQSVXXPSASA

SEQ ID NO: 11575 - protein, 21 aa, Artificial Sequence
  Cyclic GFR-binding peptide
  MOD_RES (15)..(15): Xaa is C or S
RYYLMTLPEEETPVXELGEDN

SEQ ID NO: 11576 - protein, 18 aa, Artificial Sequence
  Cyclic GFR-binding peptide
  MOD_RES (14)..(15): Xaa is C or S
VKAIKVSRLAQPVXXPAA

SEQ ID NO: 11577 - protein, 13 aa, Artificial Sequence
  Cyclic GFR-binding peptide
YYVVPLPEHHVRS

SEQ ID NO: 11578 - protein, 19 aa, Artificial Sequence
  Cyclic GFR-binding peptide
VKPKRGVIKRIQVPRLAQP

SEQ ID NO: 11579 - protein, 16 aa, Artificial Sequence
  Cyclic GFR-binding peptide
  MOD_RES (16)..(16): Xaa is C or S
YYLVTLPEHHVRSPQX

SEQ ID NO: 11580 - protein, 19 aa, Artificial Sequence
  Cyclic GFR-binding peptide
FIPKKRVIEYYVVPLPELQ

SEQ ID NO: 11581 - protein, 27 aa, Artificial Sequence
  Cyclic GFR-binding peptide
  MOD_RES (21)..(22): Xaa is C or S
VVKENEDVKAMKVSRLETPVXXAKPIK

SEQ ID NO: 11582 - protein, 27 aa, Artificial Sequence
  Cyclic GFR-binding peptide
  MOD_RES (21)..(22): Xaa is C or S
IVNSSDDMIQVTINSLQTPAXXPKPVT

SEQ ID NO: 11583 - protein, 16 aa, Artificial Sequence
  Cyclic GFR-binding peptide
  MOD_RES (14)..(15): Xaa is C or S
IKRIQVPRLAQPVXXP

SEQ ID NO: 11584 - protein, 27 aa, Artificial Sequence
  Cyclic GFR-binding peptide
  MOD_RES (21)..(22): Xaa is C or S
VKPTRGVVKAIKVSRLDQPVXXPSASA

SEQ ID NO: 11585 - protein, 25 aa, Artificial Sequence
  Cyclic GFR-binding peptide
  MOD_RES (19)..(20): Xaa is C or S
PTRGVMIQITINSLDQPVXXPSASA

SEQ ID NO: 11586 - protein, 17 aa, Artificial Sequence
  Cyclic GFR-binding peptide
VVKDYEDMIQMTINSLE

SEQ ID NO: 11587 - protein, 20 aa, Artificial Sequence
  Cyclic GFR-binding peptide
  MOD_RES (14)..(15): Xaa is C or S
VKAIKVSRLDQPVXXPSASA

SEQ ID NO: 11588 - protein, 19 aa, Artificial Sequence
  Cyclic GFR-binding peptide
  MOD_RES (14)..(15): Xaa is C or S
IKRIQVPRLDQSVXXPSAS

SEQ ID NO: 11589 - protein, 23 aa, Artificial Sequence
  Cyclic GFR-binding peptide
  MOD_RES (19)..(19): Xaa is C or S
VIEYYVVPLPELQVQTPRXQVNR

SEQ ID NO: 11590 - protein, 19 aa, Artificial Sequence
  Cyclic GFR-binding peptide
VVKENEDVKAMKVSRLETP

SEQ ID NO: 11591 - protein, 25 aa, Artificial Sequence
  Cyclic GFR-binding peptide
  MOD_RES (19)..(20): Xaa is C or S
NSSDDMIQVTINSLQTPAXXPKPVT

SEQ ID NO: 11592 - protein, 24 aa, Artificial Sequence
  Cyclic GFR-binding peptide
  MOD_RES (18)..(19): Xaa is C or S
DYEDIKRMQVPRLETPVXXAKPIS

SEQ ID NO: 11593 - protein, 19 aa, Artificial Sequence
  Cyclic GFR-binding peptide
VKPKRGVMIQITINSLAQP

SEQ ID NO: 11594 - protein, 23 aa, Artificial Sequence
  Cyclic GFR-binding peptide
  MOD_RES (17)..(18): Xaa is C or S
KGIVKAIKVSRLDQSVXXPSASA

SEQ ID NO: 11595 - protein, 13 aa, Artificial Sequence
  Cyclic GFR-binding peptide
IKRVQVPRLQTPA

SEQ ID NO: 11596 - protein, 13 aa, Artificial Sequence
  Cyclic GFR-binding peptide
MIQVTINSLKTPA

SEQ ID NO: 11597 - protein, 27 aa, Artificial Sequence
  Cyclic GFR-binding peptide
  MOD_RES (21)..(22): Xaa is C or S
VVKENEDIKRMQVPRLETPVXXAKPIK

SEQ ID NO: 11598 - protein, 15 aa, Artificial Sequence
  Cyclic GFR-binding peptide
  MOD_RES (14)..(15): Xaa is C or S
IKRIQVPRLAQPVXX

SEQ ID NO: 11599 - protein, 14 aa, Artificial Sequence
  Cyclic GFR-binding peptide
  MOD_RES (14)..(14): Xaa is C or S
VKAMKVSRLETPVX

SEQ ID NO: 11600 - protein, 25 aa, Artificial Sequence
  Cyclic GFR-binding peptide
  MOD_RES (19)..(20): Xaa is C or S
NSSDDVKAVKVSRLQTPAXXPKPVT

SEQ ID NO: 11601 - protein, 14 aa, Artificial Sequence
  Cyclic GFR-binding peptide
  MOD_RES (14)..(14): Xaa is C or S
MIQITINSLAQPVX

SEQ ID NO: 11602 - protein, 17 aa, Artificial Sequence
  Cyclic GFR-binding peptide
IKPTKGIVKAIKVSRLD

SEQ ID NO: 11603 - protein, 24 aa, Artificial Sequence
  Cyclic GFR-binding peptide
  MOD_RES (18)..(19): Xaa is C or S
KRGVVKAIKVSRLAQPVXXPAASA

SEQ ID NO: 11604 - protein, 16 aa, Artificial Sequence
  Cyclic GFR-binding peptide
VKPKRGVMIQITINSL

SEQ ID NO: 11605 - protein, 16 aa, Artificial Sequence
  Cyclic GFR-binding peptide
  MOD_RES (14)..(15): Xaa is C or S
MIQITINSLDQSVXXP

SEQ ID NO: 11606 - protein, 18 aa, Artificial Sequence
  Cyclic GFR-binding peptide
  MOD_RES (14)..(15): Xaa is C or S
IKRIQVPRLAQPVXXPAA

SEQ ID NO: 11607 - protein, 26 aa, Artificial Sequence
  Cyclic GFR-binding peptide
  MOD_RES (20)..(21): Xaa is C or S
VKDYEDIKRMQVPRLETPVXXAKPIS

SEQ ID NO: 11608 - protein, 16 aa, Artificial Sequence
  Cyclic GFR-binding peptide
  MOD_RES (14)..(15): Xaa is C or S
MIQMTINSLETPVXXA

SEQ ID NO: 11609 - protein, 21 aa, Artificial Sequence
  Cyclic GFR-binding peptide
  MOD_RES (15)..(16): Xaa is C or S
DVKAVKVSRLKTPAXXPKPVY

SEQ ID NO: 11610 - protein, 23 aa, Artificial Sequence
  Cyclic GFR-binding peptide
  MOD_RES (17)..(18): Xaa is C or S
KGIIKRIQVPRLDQSVXXPSASA

SEQ ID NO: 11611 - protein, 17 aa, Artificial Sequence
  Cyclic GFR-binding peptide
VKPKRGVIKRIQVPRLA

SEQ ID NO: 11612 - protein, 19 aa, Artificial Sequence
  Cyclic GFR-binding peptide
IVNSSDDVKAVKVSRLQTP

SEQ ID NO: 11613 - protein, 17 aa, Artificial Sequence
  Cyclic GFR-binding peptide
  MOD_RES (14)..(15): Xaa is C or S
VKAIKVSRLDQPVXXPS

SEQ ID NO: 11614 - protein, 24 aa, Artificial Sequence
  Cyclic GFR-binding peptide
  MOD_RES (18)..(19): Xaa is C or S
ENEDIKRMQVPRLETPVXXAKPIK

SEQ ID NO: 11615 - protein, 17 aa, Artificial Sequence
  Cyclic GFR-binding peptide
  MOD_RES (14)..(15): Xaa is C or S
VKAMKVSRLETPVXXAK

SEQ ID NO: 11616 - protein, 16 aa, Artificial Sequence
  Cyclic GFR-binding peptide
VKPTRGVMIQITINSL

SEQ ID NO: 11617 - protein, 19 aa, Artificial Sequence
  Cyclic GFR-binding peptide
  MOD_RES (14)..(14): Xaa is C or S
VKAVKVSRLKTPAXTPKTV

SEQ ID NO: 11618 - protein, 18 aa, Artificial Sequence
  Cyclic GFR-binding peptide
  MOD_RES (14)..(15): Xaa is C or S
MIQITINSLAQPVXXPAA

SEQ ID NO: 11619 - protein, 18 aa, Artificial Sequence
  Cyclic GFR-binding peptide
IVNSSDDVKAVKVSRLKT

SEQ ID NO: 11620 - protein, 18 aa, Artificial Sequence
  Cyclic GFR-binding peptide
IVNSSDDVKAVKVSRLQT

SEQ ID NO: 11621 - protein, 26 aa, Artificial Sequence
  Cyclic GFR-binding peptide
  MOD_RES (20)..(21): Xaa is C or S
VKENEDIKRMQVPRLETPVXXAKPIK

SEQ ID NO: 11622 - protein, 26 aa, Artificial Sequence
  Cyclic GFR-binding peptide
  MOD_RES (20)..(21): Xaa is C or S
VKDYEDMIQMTINSLETPVXXAKPIS

SEQ ID NO: 11623 - protein, 23 aa, Artificial Sequence
  Cyclic GFR-binding peptide
  MOD_RES (17)..(18): Xaa is C or S
NEDVKAMKVSRLETPVXXAKPIK

SEQ ID NO: 11624 - protein, 19 aa, Artificial Sequence
  Cyclic GFR-binding peptide
IVNSSDDVKAVKVSRLKTP

SEQ ID NO: 11625 - protein, 18 aa, Artificial Sequence
  Cyclic GFR-binding peptide
  MOD_RES (14)..(15): Xaa is C or S
VKAIKVSRLDQSVXXPSA

SEQ ID NO: 11626 - protein, 18 aa, Artificial Sequence
  Cyclic GFR-binding peptide
IVNSSDDIKRVQVPRLQT

SEQ ID NO: 11627 - protein, 18 aa, Artificial Sequence
  Cyclic GFR-binding peptide
IVNSSDDIKRVQVPRLKT

SEQ ID NO: 11628 - protein, 29 aa, Artificial Sequence
  Cyclic GFR-binding peptide
  MOD_RES (23)..(23): Xaa is C or S
HQGQHPKIRYYVMPLPEEETPVXELGEDN

SEQ ID NO: 11629 - protein, 19 aa, Artificial Sequence
  Cyclic GFR-binding peptide
VKPTRGVVKAIKVSRLDQP

SEQ ID NO: 11630 - protein, 14 aa, Artificial Sequence
  Cyclic GFR-binding peptide
  MOD_RES (14)..(14): Xaa is C or S
VKAVKVSRLKTPAX

SEQ ID NO: 11631 - protein, 18 aa, Artificial Sequence
  Cyclic GFR-binding peptide
  MOD_RES (14)..(15): Xaa is C or S
IKRVQVPRLKTPAXXPKP

SEQ ID NO: 11632 - protein, 27 aa, Artificial Sequence
  Cyclic GFR-binding peptide
  MOD_RES (21)..(21): Xaa is C or S
IVNSSDDIKRVQVPRLKTPAXTPKTVH

SEQ ID NO: 11633 - protein, 24 aa, Artificial Sequence
  Cyclic GFR-binding peptide
  MOD_RES (18)..(18): Xaa is C or S
SSDDVKAVKVSRLKTPAXTPKTVH

SEQ ID NO: 11634 - protein, 19 aa, Artificial Sequence
  Cyclic GFR-binding peptide
VKPTRGVIKRIQVPRLDQP

SEQ ID NO: 11635 - protein, 21 aa, Artificial Sequence
  Cyclic GFR-binding peptide
  MOD_RES (15)..(16): Xaa is C or S
VVKAIKVSRLAQPVXXPAASA

SEQ ID NO: 11636 - protein, 19 aa, Artificial Sequence
  Cyclic GFR-binding peptide
  MOD_RES (14)..(15): Xaa is C or S
MIQMTINSLETPVXXAKPI

SEQ ID NO: 11637 - protein, 27 aa, Artificial Sequence
  Cyclic GFR-binding peptide
  MOD_RES (21)..(21): Xaa is C or S
IVNSSDDMIQVTINSLKTPAXTPKTVH

SEQ ID NO: 11638 - protein, 16 aa, Artificial Sequence
  Cyclic GFR-binding peptide
VVKDYEDVKAMKVSRL

SEQ ID NO: 11639 - protein, 27 aa, Artificial Sequence
  Cyclic GFR-binding peptide
  MOD_RES (21)..(22): Xaa is C or S
VVKDYEDIKRMQVPRLETPVXXAKPIS

SEQ ID NO: 11640 - protein, 16 aa, Artificial Sequence
  Cyclic GFR-binding peptide
  MOD_RES (14)..(15): Xaa is C or S
MIQITINSLAQPVXXP

SEQ ID NO: 11641 - protein, 28 aa, Artificial Sequence
  Cyclic GFR-binding peptide
  MOD_RES (24)..(24): Xaa is C or S
KPKKRVYEYYLVTLPEHHVRSPQXKVSS

SEQ ID NO: 11642 - protein, 16 aa, Artificial Sequence
  Cyclic GFR-binding peptide
  MOD_RES (14)..(15): Xaa is C or S
MIQITINSLDQPVXXP

SEQ ID NO: 11643 - protein, 14 aa, Artificial Sequence
  Cyclic GFR-binding peptide
YYVVPLPEHHVRSP

SEQ ID NO: 11644 - protein, 17 aa, Artificial Sequence
  Cyclic GFR-binding peptide
  MOD_RES (14)..(14): Xaa is C or S
MIQVTINSLKTPAXTPK

SEQ ID NO: 11645 - protein, 16 aa, Artificial Sequence
  Cyclic GFR-binding peptide
VVKDYEDIKRMQVPRL

SEQ ID NO: 11646 - protein, 24 aa, Artificial Sequence
  Cyclic GFR-binding peptide
  MOD_RES (18)..(18): Xaa is C or S
SSDDMIQVTINSLKTPAXTPKTVH

SEQ ID NO: 11647 - protein, 15 aa, Artificial Sequence
  Cyclic GFR-binding peptide
  MOD_RES (14)..(15): Xaa is C or S
MIQITINSLDQSVXX

SEQ ID NO: 11648 - protein, 15 aa, Artificial Sequence
  Cyclic GFR-binding peptide
VKPTRGVMIQITINS

SEQ ID NO: 11649 - protein, 27 aa, Artificial Sequence
  Cyclic GFR-binding peptide
  MOD_RES (21)..(21): Xaa is C or S
GQHPKIRYYVMPLPEEETPVXELGEDN

SEQ ID NO: 11650 - protein, 16 aa, Artificial Sequence
  Cyclic GFR-binding peptide
  MOD_RES (14)..(14): Xaa is C or S
YYVMPLPEEETPVXEL

SEQ ID NO: 11651 - protein, 25 aa, Artificial Sequence
  Cyclic GFR-binding peptide
  MOD_RES (19)..(19): Xaa is C or S
NSSDDIKRVQVPRLKTPAXTPKTVH

SEQ ID NO: 11652 - protein, 15 aa, Artificial Sequence
  Cyclic GFR-binding peptide
VVKENEDMIQMTINS

SEQ ID NO: 11653 - protein, 25 aa, Artificial Sequence
  Cyclic GFR-binding peptide
  MOD_RES (19)..(20): Xaa is C or S
PTKGIMIQITINSLDQSVXXPSASA

SEQ ID NO: 11654 - protein, 20 aa, Artificial Sequence
  Cyclic GFR-binding peptide
LKPKKRVYEYYVVPLPEHHV

SEQ ID NO: 11655 - protein, 25 aa, Artificial Sequence
  Cyclic GFR-binding peptide
  MOD_RES (19)..(19): Xaa is C or S
HPKIRYYLMTLPEEETPVXELGEDN

SEQ ID NO: 11656 - protein, 17 aa, Artificial Sequence
  Cyclic GFR-binding peptide
FIPKKRVIEYYVVPLPE

SEQ ID NO: 11657 - protein, 18 aa, Artificial Sequence
  Cyclic GFR-binding peptide
HQGQHPKIRYYVMPLPEE

SEQ ID NO: 11658 - protein, 21 aa, Artificial Sequence
  Cyclic GFR-binding peptide
  MOD_RES (17)..(17): Xaa is C or S
EYYLVTLPELQVQTPRXQVNR

SEQ ID NO: 11659 - protein, 22 aa, Artificial Sequence
  Cyclic GFR-binding peptide
  MOD_RES (16)..(17): Xaa is C or S
GVVKAIKVSRLAQPVXXPAASA

SEQ ID NO: 11660 - protein, 26 aa, Artificial Sequence
  Cyclic GFR-binding peptide
  MOD_RES (20)..(21): Xaa is C or S
KPTKGIIKRIQVPRLDQSVXXPSASA

SEQ ID NO: 11661 - protein, 18 aa, Artificial Sequence
  Cyclic GFR-binding peptide
VVKENEDIKRMQVPRLET

SEQ ID NO: 11662 - protein, 18 aa, Artificial Sequence
  Cyclic GFR-binding peptide
  MOD_RES (14)..(14): Xaa is C or S
MIQVTINSLKTPAXTPKT

SEQ ID NO: 11663 - protein, 21 aa, Artificial Sequence
  Cyclic GFR-binding peptide
  MOD_RES (15)..(16): Xaa is C or S
DIKRVQVPRLKTPAXXPKPVY

SEQ ID NO: 11664 - protein, 21 aa, Artificial Sequence
  Cyclic GFR-binding peptide
  MOD_RES (15)..(16): Xaa is C or S
IMIQITINSLDQSVXXPSASA

SEQ ID NO: 11665 - protein, 21 aa, Artificial Sequence
  Cyclic GFR-binding peptide
  MOD_RES (17)..(17): Xaa is C or S
EYYVVPLPEHHVRSPQXKVSS

SEQ ID NO: 11666 - protein, 15 aa, Artificial Sequence
  Cyclic GFR-binding peptide
  MOD_RES (14)..(15): Xaa is C or S
MIQITINSLDQPVXX

SEQ ID NO: 11667 - protein, 13 aa, Artificial Sequence
  Cyclic GFR-binding peptide
IKRVQVPRLKTPA

SEQ ID NO: 11668 - protein, 17 aa, Artificial Sequence
  Cyclic GFR-binding peptide
VKPTRGVVKAIKVSRLD

SEQ ID NO: 11669 - protein, 13 aa, Artificial Sequence
  Cyclic GFR-binding peptide
MIQVTINSLQTPA

SEQ ID NO: 11670 - protein, 18 aa, Artificial Sequence
  Cyclic GFR-binding peptide
FIPKKRVIEYYLVTLPEL

SEQ ID NO: 11671 - protein, 13 aa, Artificial Sequence
  Cyclic GFR-binding peptide
YYLVTLPELQVQT

SEQ ID NO: 11672 - protein, 15 aa, Artificial Sequence
  Cyclic GFR-binding peptide
  MOD_RES (14)..(15): Xaa is C or S
VKAMKVSRLETPVXX

SEQ ID NO: 11673 - protein, 25 aa, Artificial Sequence
  Cyclic GFR-binding peptide
  MOD_RES (19)..(20): Xaa is C or S
PTKGIVKAIKVSRLDQSVXXPSASA

SEQ ID NO: 11674 - protein, 17 aa, Artificial Sequence
  Cyclic GFR-binding peptide
  MOD_RES (14)..(14): Xaa is C or S
IKRVQVPRLKTPAXTPK

SEQ ID NO: 11675 - protein, 16 aa, Artificial Sequence
  Cyclic GFR-binding peptide
  MOD_RES (14)..(15): Xaa is C or S
IKRMQVPRLETPVXXA

SEQ ID NO: 11676 - protein, 14 aa, Artificial Sequence
  Cyclic GFR-binding peptide
YYLVTLPELQVQTP

SEQ ID NO: 11677 - protein, 17 aa, Artificial Sequence
  Cyclic GFR-binding peptide
VKPKRGVMIQITINSLA

SEQ ID NO: 11678 - protein, 21 aa, Artificial Sequence
  Cyclic GFR-binding peptide
LKPKKRVYEYYLVTLPEHHVR

SEQ ID NO: 11679 - protein, 19 aa, Artificial Sequence
  Cyclic GFR-binding peptide
  MOD_RES (16)..(16): Xaa is C or S
YYVVPLPELQVQTPRXQVN

SEQ ID NO: 11680 - protein, 13 aa, Artificial Sequence
  Cyclic GFR-binding peptide
YYVVPLPELQVQT

SEQ ID NO: 11681 - protein, 19 aa, Artificial Sequence
  Cyclic GFR-binding peptide
IKPTKGIIKRIQVPRLDQS

SEQ ID NO: 11682 - protein, 16 aa, Artificial Sequence
  Cyclic GFR-binding peptide
IKPTKGIMIQITINSL

SEQ ID NO: 11683 - protein, 22 aa, Artificial Sequence
  Cyclic GFR-binding peptide
  MOD_RES (16)..(17): Xaa is C or S
EDMIQMTINSLETPVXXAKPIK

SEQ ID NO: 11684 - protein, 17 aa, Artificial Sequence
  Cyclic GFR-binding peptide
  MOD_RES (14)..(15): Xaa is C or S
MIQVTINSLQTPAXXPK

SEQ ID NO: 11685 - protein, 19 aa, Artificial Sequence
  Cyclic GFR-binding peptide
  MOD_RES (14)..(15): Xaa is C or S
VKAVKVSRLKTPAXXPKPV

SEQ ID NO: 11686 - protein, 23 aa, Artificial Sequence
  Cyclic GFR-binding peptide
  MOD_RES (17)..(17): Xaa is C or S
KIRYYLMTLPEEETPVXELGEDN

SEQ ID NO: 11687 - protein, 20 aa, Artificial Sequence
  Cyclic GFR-binding peptide
  MOD_RES (14)..(15): Xaa is C or S
VKAIKVSRLDQSVXXPSASA

SEQ ID NO: 11688 - protein, 24 aa, Artificial Sequence
  Cyclic GFR-binding peptide
  MOD_RES (18)..(19): Xaa is C or S
KRGVMIQITINSLAQPVXXPAASA

SEQ ID NO: 11689 - protein, 14 aa, Artificial Sequence
  Cyclic GFR-binding peptide
  MOD_RES (14)..(14): Xaa is C or S
IKRIQVPRLAQPVX

SEQ ID NO: 11690 - protein, 21 aa, Artificial Sequence
  Cyclic GFR-binding peptide
  MOD_RES (15)..(16): Xaa is C or S
DVKAMKVSRLETPVXXAKPIK

SEQ ID NO: 11691 - protein, 24 aa, Artificial Sequence
  Cyclic GFR-binding peptide
  MOD_RES (18)..(19): Xaa is C or S
SSDDVKAVKVSRLKTPAXXPKPVY

SEQ ID NO: 11692 - protein, 15 aa, Artificial Sequence
  Cyclic GFR-binding peptide
IVNSSDDMIQVTINS

SEQ ID NO: 11693 - protein, 20 aa, Artificial Sequence
  Cyclic GFR-binding peptide
  MOD_RES (14)..(15): Xaa is C or S
VKAVKVSRLQTPAXXPKPVT

SEQ ID NO: 11694 - protein, 24 aa, Artificial Sequence
  Cyclic GFR-binding peptide
  MOD_RES (18)..(19): Xaa is C or S
SSDDMIQVTINSLKTPAXXPKPVY

SEQ ID NO: 11695 - protein, 21 aa, Artificial Sequence
  Cyclic GFR-binding peptide
  MOD_RES (15)..(16): Xaa is C or S
DMIQVTINSLQTPAXXPKPVT

SEQ ID NO: 11696 - protein, 18 aa, Artificial Sequence
  Cyclic GFR-binding peptide
  MOD_RES (14)..(15): Xaa is C or S
VKAIKVSRLDQPVXXPSA

SEQ ID NO: 11697 - protein, 28 aa, Artificial Sequence
  Cyclic GFR-binding peptide
  MOD_RES (24)..(24): Xaa is C or S
KPKKRVYEYYVVPLPEHHVRSPQXKVSS

SEQ ID NO: 11698 - protein, 16 aa, Artificial Sequence
  Cyclic GFR-binding peptide
  MOD_RES (14)..(14): Xaa is C or S
YYLMTLPEEETPVXEL

SEQ ID NO: 11699 - protein, 14 aa, Artificial Sequence
  Cyclic GFR-binding peptide
  MOD_RES (14)..(14): Xaa is C or S
VKAVKVSRLQTPAX

SEQ ID NO: 11700 - protein, 15 aa, Artificial Sequence
  Cyclic GFR-binding peptide
  MOD_RES (14)..(15): Xaa is C or S
MIQITINSLAQPVXX

SEQ ID NO: 11701 - protein, 14 aa, Artificial Sequence
  Cyclic GFR-binding peptide
  MOD_RES (14)..(14): Xaa is C or S
IKRIQVPRLDQPVX

SEQ ID NO: 11702 - protein, 18 aa, Artificial Sequence
  Cyclic GFR-binding peptide
  MOD_RES (14)..(15): Xaa is C or S
MIQVTINSLKTPAXXPKP

SEQ ID NO: 11703 - protein, 15 aa, Artificial Sequence
  Cyclic GFR-binding peptide
YYVVPLPELQVQTPR

SEQ ID NO: 11704 - protein, 18 aa, Artificial Sequence
  Cyclic GFR-binding peptide
  MOD_RES (14)..(15): Xaa is C or S
VKAMKVSRLETPVXXAKP

SEQ ID NO: 11705 - protein, 19 aa, Artificial Sequence
  Cyclic GFR-binding peptide
  MOD_RES (14)..(15): Xaa is C or S
VKAIKVSRLAQPVXXPAAS

SEQ ID NO: 11706 - protein, 22 aa, Artificial Sequence
  Cyclic GFR-binding peptide
  MOD_RES (16)..(17): Xaa is C or S
EDVKAMKVSRLETPVXXAKPIK

SEQ ID NO: 11707 - protein, 16 aa, Artificial Sequence
  Cyclic GFR-binding peptide
  MOD_RES (16)..(16): Xaa is C or S
YYLVTLPELQVQTPRX

SEQ ID NO: 11708 - protein, 14 aa, Artificial Sequence
  Cyclic GFR-binding peptide
  MOD_RES (14)..(14): Xaa is C or S
MIQITINSLDQSVX

SEQ ID NO: 11709 - protein, 21 aa, Artificial Sequence
  Cyclic GFR-binding peptide
HQGQHPKIRYYVMPLPEEETP

SEQ ID NO: 11710 - protein, 18 aa, Artificial Sequence
  Cyclic GFR-binding peptide
  MOD_RES (14)..(15): Xaa is C or S
IKRVQVPRLQTPAXXPKP

SEQ ID NO: 11711 - protein, 18 aa, Artificial Sequence
  Cyclic GFR-binding peptide
VKPTRGVIKRIQVPRLDQ

SEQ ID NO: 11712 - protein, 23 aa, Artificial Sequence
  Cyclic GFR-binding peptide
  MOD_RES (17)..(17): Xaa is C or S
SDDVKAVKVSRLKTPAXTPKTVH

SEQ ID NO: 11713 - protein, 21 aa, Artificial Sequence
  Cyclic GFR-binding peptide
FIPKKRVIEYYLVTLPELQVQ

SEQ ID NO: 11714 - protein, 26 aa, Artificial Sequence
  Cyclic GFR-binding peptide
  MOD_RES (20)..(21): Xaa is C or S
KPTRGVIKRIQVPRLDQPVXXPSASA

SEQ ID NO: 11715 - protein, 26 aa, Artificial Sequence
  Cyclic GFR-binding peptide
  MOD_RES (22)..(22): Xaa is C or S
KKRVIEYYLVTLPELQVQTPRXQVNR

SEQ ID NO: 11716 - protein, 17 aa, Artificial Sequence
  Cyclic GFR-binding peptide
  MOD_RES (14)..(15): Xaa is C or S
MIQVTINSLKTPAXXPK

SEQ ID NO: 11717 - protein, 21 aa, Artificial Sequence
  Cyclic GFR-binding peptide
  MOD_RES (15)..(16): Xaa is C or S
DMIQMTINSLETPVXXAKPIS

SEQ ID NO: 11718 - protein, 20 aa, Artificial Sequence
  Cyclic GFR-binding peptide
HQGQHPKIRYYVMPLPEEET

SEQ ID NO: 11719 - protein, 25 aa, Artificial Sequence
  Cyclic GFR-binding peptide
  MOD_RES (19)..(20): Xaa is C or S
PTRGVVKAIKVSRLDQPVXXPSASA

SEQ ID NO: 11720 - protein, 21 aa, Artificial Sequence
  Cyclic GFR-binding peptide
  MOD_RES (15)..(16): Xaa is C or S
VMIQITINSLDQPVXXPSASA

SEQ ID NO: 11721 - protein, 20 aa, Artificial Sequence
  Cyclic GFR-binding peptide
  MOD_RES (14)..(15): Xaa is C or S
VKAMKVSRLETPVXXAKPIS

SEQ ID NO: 11722 - protein, 25 aa, Artificial Sequence
  Cyclic GFR-binding peptide
  MOD_RES (19)..(20): Xaa is C or S
KENEDVKAMKVSRLETPVXXAKPIK

SEQ ID NO: 11723 - protein, 15 aa, Artificial Sequence
  Cyclic GFR-binding peptide
IKPTKGIIKRIQVPR

SEQ ID NO: 11724 - protein, 27 aa, Artificial Sequence
  Cyclic GFR-binding peptide
  MOD_RES (21)..(22): Xaa is C or S
IVNSSDDVKAVKVSRLKTPAXXPKPVY

SEQ ID NO: 11725 - protein, 19 aa, Artificial Sequence
  Cyclic GFR-binding peptide
HQGQHPKIRYYVMPLPEEE

SEQ ID NO: 11726 - protein, 17 aa, Artificial Sequence
  Cyclic GFR-binding peptide
LKPKKRVYEYYLVTLPE

SEQ ID NO: 11727 - protein, 19 aa, Artificial Sequence
  Cyclic GFR-binding peptide
  MOD_RES (16)..(16): Xaa is C or S
YYLVTLPELQVQTPRXQVN

SEQ ID NO: 11728 - protein, 19 aa, Artificial Sequence
  Cyclic GFR-binding peptide
LKPKKRVYEYYLVTLPEHH

SEQ ID NO: 11729 - protein, 15 aa, Artificial Sequence
  Cyclic GFR-binding peptide
  MOD_RES (1)..(2): Xaa is C or S
XXVSQDLRSVKIAKV

SEQ ID NO: 11730 - protein, 22 aa, Artificial Sequence
  Cyclic GFR-binding peptide
  MOD_RES (5)..(5): Xaa is C or S
SSVKXQPSRVHHEPLPVVYYEY

SEQ ID NO: 11731 - protein, 20 aa, Artificial Sequence
  Cyclic GFR-binding peptide
  MOD_RES (6)..(7): Xaa is C or S
YVPKPXXAPTKLRSVKVAKV

SEQ ID NO: 11732 - protein, 28 aa, Artificial Sequence
  Cyclic GFR-binding peptide
  MOD_RES (5)..(5): Xaa is C or S
RNVQXRPTQVQLEPLPVVYYEIVRKKPI

SEQ ID NO: 11733 - protein, 23 aa, Artificial Sequence
  Cyclic GFR-binding peptide
  MOD_RES (6)..(7): Xaa is C or S
ASAAPXXVPQALRPVQIRKIVGR

SEQ ID NO: 11734 - protein, 19 aa, Artificial Sequence
  Cyclic GFR-binding peptide
  MOD_RES (5)..(6): Xaa is C or S
VPKPXXAPTQLRSVKVAKV

SEQ ID NO: 11735 - protein, 26 aa, Artificial Sequence
  Cyclic GFR-binding peptide
  MOD_RES (7)..(7): Xaa is C or S
NDEGLEXVPTEEEPLTMLYYRIKPHQ

SEQ ID NO: 11736 - protein, 16 aa, Artificial Sequence
  Cyclic GFR-binding peptide
LRSVKMAKVDENEKVV

SEQ ID NO: 11737 - protein, 21 aa, Artificial Sequence
  Cyclic GFR-binding peptide
  MOD_RES (6)..(7): Xaa is C or S
KIPKAXXVPTELSNITMQIMD

SEQ ID NO: 11738 - protein, 18 aa, Artificial Sequence
  Cyclic GFR-binding peptide
QDLRSVKIAKVIGKTPKI

SEQ ID NO: 11739 - protein, 17 aa, Artificial Sequence
  Cyclic GFR-binding peptide
  MOD_RES (3)..(4): Xaa is C or S
APXXVPQALRPVQIRKI

SEQ ID NO: 11740 - protein, 18 aa, Artificial Sequence
  Cyclic GFR-binding peptide
TELSNITMQIMDEYDKVV

SEQ ID NO: 11741 - protein, 22 aa, Artificial Sequence
  Cyclic GFR-binding peptide
  MOD_RES (6)..(7): Xaa is C or S
SIPKAXXVPTELSNITMQIMDE

SEQ ID NO: 11742 - protein, 14 aa, Artificial Sequence
  Cyclic GFR-binding peptide
  MOD_RES (1)..(1): Xaa is C or S
XVPTELSNITMQIM

SEQ ID NO: 11743 - protein, 13 aa, Artificial Sequence
  Cyclic GFR-binding peptide
VSQDLRSVKIAKV

SEQ ID NO: 11744 - protein, 24 aa, Artificial Sequence
  Cyclic GFR-binding peptide
  MOD_RES (6)..(7): Xaa is C or S
KIPKAXXVPTELRSVKMAKVDENE

SEQ ID NO: 11745 - protein, 27 aa, Artificial Sequence
  Cyclic GFR-binding peptide
  MOD_RES (6)..(7): Xaa is C or S
ASAAPXXVPQALRPVQIRKIVGRKPKV

SEQ ID NO: 11746 - protein, 15 aa, Artificial Sequence
  Cyclic GFR-binding peptide
RPVQIRKIVGRKPKV

SEQ ID NO: 11747 - protein, 14 aa, Artificial Sequence
  Cyclic GFR-binding peptide
  MOD_RES (1)..(1): Xaa is C or S
XVPQDLSNITIQIM

SEQ ID NO: 11748 - protein, 22 aa, Artificial Sequence
  Cyclic GFR-binding peptide
  MOD_RES (6)..(7): Xaa is C or S
ASASPXXVSQDLSNITIQIMIG

SEQ ID NO: 11749 - protein, 23 aa, Artificial Sequence
  Cyclic GFR-binding peptide
  MOD_RES (6)..(7): Xaa is C or S
SIPKAXXVPTELSNITMQIMDEY

SEQ ID NO: 11750 - protein, 14 aa, Artificial Sequence
  Cyclic GFR-binding peptide
  MOD_RES (1)..(1): Xaa is C or S
XVPTEEEPLTMLYY

SEQ ID NO: 11751 - protein, 18 aa, Artificial Sequence
  Cyclic GFR-binding peptide
  MOD_RES (5)..(5): Xaa is C or S
TKPTXAPTKLRPVQVRKI

SEQ ID NO: 11752 - protein, 17 aa, Artificial Sequence
  Cyclic GFR-binding peptide
ELSNITMQIMDENEKVV

SEQ ID NO: 11753 - protein, 14 aa, Artificial Sequence
  Cyclic GFR-binding peptide
  MOD_RES (1)..(1): Xaa is C or S
XVPTELRPVQMRKI

SEQ ID NO: 11754 - protein, 16 aa, Artificial Sequence
  Cyclic GFR-binding peptide
LSNITMQIMDENEKVV

SEQ ID NO: 11755 - protein, 17 aa, Artificial Sequence
  Cyclic GFR-binding peptide
  MOD_RES (3)..(4): Xaa is C or S
KPXXAPTQLRPVQVRKI

SEQ ID NO: 11756 - protein, 22 aa, Artificial Sequence
  Cyclic GFR-binding peptide
  MOD_RES (7)..(7): Xaa is C or S
HVTKPTXAPTKLRPVQVRKIDD

SEQ ID NO: 11757 - protein, 18 aa, Artificial Sequence
  Cyclic GFR-binding peptide
QDLSNITIQIMIGKTPKI

SEQ ID NO: 11758 - protein, 25 aa, Artificial Sequence
  Cyclic GFR-binding peptide
  MOD_RES (7)..(7): Xaa is C or S
HVTKPTXAPTKLRSVKVAKVDDSSN

SEQ ID NO: 11759 - protein, 17 aa, Artificial Sequence
  Cyclic GFR-binding peptide
  MOD_RES (3)..(4): Xaa is C or S
APXXVPQALSNITIQIM

SEQ ID NO: 11760 - protein, 18 aa, Artificial Sequence
  Cyclic GFR-binding peptide
TELRSVKMAKVDEYDKVV

SEQ ID NO: 11761 - protein, 22 aa, Artificial Sequence
  Cyclic GFR-binding peptide
  MOD_RES (6)..(7): Xaa is C or S
KIPKAXXVPTELRPVQMRKIDE

SEQ ID NO: 11762 - protein, 18 aa, Artificial Sequence
  Cyclic GFR-binding peptide
  MOD_RES (4)..(5): Xaa is C or S
PKAXXVPTELSNITMQIM

SEQ ID NO: 11763 - protein, 23 aa, Artificial Sequence
  Cyclic GFR-binding peptide
  MOD_RES (5)..(5): Xaa is C or S
SSVKXQPSRVHHEPLTVLYYEYV

SEQ ID NO: 11764 - protein, 17 aa, Artificial Sequence
  Cyclic GFR-binding peptide
  MOD_RES (3)..(4): Xaa is C or S
SPXXVSQDLRSVKIAKV

SEQ ID NO: 11765 - protein, 21 aa, Artificial Sequence
  Cyclic GFR-binding peptide
  MOD_RES (7)..(7): Xaa is C or S
HVTKPTXAPTKLRPVQVRKID

SEQ ID NO: 11766 - protein, 25 aa, Artificial Sequence
  Cyclic GFR-binding peptide
  MOD_RES (6)..(7): Xaa is C or S
SIPKAXXVPTELRPVQMRKIDEYDK

SEQ ID NO: 11767 - protein, 27 aa, Artificial Sequence
  Cyclic GFR-binding peptide
  MOD_RES (6)..(7): Xaa is C or S
ASASPXXVSQDLRSVKIAKVIGKTPKI

SEQ ID NO: 11768 - protein, 19 aa, Artificial Sequence
  Cyclic GFR-binding peptide
PTELRSVKMAKVDEYDKVV

SEQ ID NO: 11769 - protein, 13 aa, Artificial Sequence
  Cyclic GFR-binding peptide
VPTELRPVQMRKI

SEQ ID NO: 11770 - protein, 21 aa, Artificial Sequence
  Cyclic GFR-binding peptide
  MOD_RES (6)..(7): Xaa is C or S
ASASPXXVSQDLRSVKIAKVI

SEQ ID NO: 11771 - protein, 25 aa, Artificial Sequence
  Cyclic GFR-binding peptide
  MOD_RES (6)..(7): Xaa is C or S
SIPKAXXVPTELSNITMQIMDEYDK

SEQ ID NO: 11772 - protein, 19 aa, Artificial Sequence
  Cyclic GFR-binding peptide
  MOD_RES (5)..(6): Xaa is C or S
SASPXXVSQDLRSVKIAKV

SEQ ID NO: 11773 - protein, 24 aa, Artificial Sequence
  Cyclic GFR-binding peptide
  MOD_RES (6)..(7): Xaa is C or S
ASASPXXVPQDLRSVKIAKVVGRT

SEQ ID NO: 11774 - protein, 19 aa, Artificial Sequence
  Cyclic GFR-binding peptide
QLEPLTVLYYEIVRKKPIF

SEQ ID NO: 11775 - protein, 14 aa, Artificial Sequence
  Cyclic GFR-binding peptide
  MOD_RES (1)..(1): Xaa is C or S
XVPTEEEPLPMVYY

SEQ ID NO: 11776 - protein, 19 aa, Artificial Sequence
  Cyclic GFR-binding peptide
  MOD_RES (5)..(6): Xaa is C or S
IPKAXXVPTELRSVKMAKV

SEQ ID NO: 11777 - protein, 26 aa, Artificial Sequence
  Cyclic GFR-binding peptide
  MOD_RES (7)..(7): Xaa is C or S
HVTKPTXAPTKLRSVKVAKVDDSSNV

SEQ ID NO: 11778 - protein, 24 aa, Artificial Sequence
  Cyclic GFR-binding peptide
  MOD_RES (6)..(7): Xaa is C or S
KIPKAXXVPTELSNITMQIMDENE

SEQ ID NO: 11779 - protein, 28 aa, Artificial Sequence
  Cyclic GFR-binding peptide
  MOD_RES (7)..(7): Xaa is C or S
NDEGLEXVPTEEEPLPMVYYRIKPHQGQ

SEQ ID NO: 11780 - protein, 27 aa, Artificial Sequence
  Cyclic GFR-binding peptide
  MOD_RES (5)..(5): Xaa is C or S
RNVQXRPTQVQLEPLPVVYYEIVRKKP

SEQ ID NO: 11781 - protein, 17 aa, Artificial Sequence
  Cyclic GFR-binding peptide
KLRPVQVRKIDDSSNVI

SEQ ID NO: 11782 - protein, 14 aa, Artificial Sequence
  Cyclic GFR-binding peptide
  MOD_RES (1)..(1): Xaa is C or S
XVPQALRSVKIAKV

SEQ ID NO: 11783 - protein, 16 aa, Artificial Sequence
  Cyclic GFR-binding peptide
LRPVQVRKIDDSSNVI

SEQ ID NO: 11784 - protein, 15 aa, Artificial Sequence
  Cyclic GFR-binding peptide
  MOD_RES (1)..(2): Xaa is C or S
XXVPTELRPVQMRKI

SEQ ID NO: 11785 - protein, 27 aa, Artificial Sequence
  Cyclic GFR-binding peptide
  MOD_RES (6)..(7): Xaa is C or S
ASASPXXVSQDLSNITIQIMIGKTPKI

SEQ ID NO: 11786 - protein, 26 aa, Artificial Sequence
  Cyclic GFR-binding peptide
  MOD_RES (7)..(7): Xaa is C or S
HVTKPTXAPTKLRPVQVRKIDDSSNV

SEQ ID NO: 11787 - protein, 14 aa, Artificial Sequence
  Cyclic GFR-binding peptide
  MOD_RES (1)..(1): Xaa is C or S
XVSQDLRPVQIRKI

SEQ ID NO: 11788 - protein, 15 aa, Artificial Sequence
  Cyclic GFR-binding peptide
  MOD_RES (2)..(2): Xaa is C or S
EXVPTEEEPLTMLYY

SEQ ID NO: 11789 - protein, 16 aa, Artificial Sequence
  Cyclic GFR-binding peptide
  MOD_RES (2)..(3): Xaa is C or S
AXXVPTELRSVKMAKV

SEQ ID NO: 11790 - protein, 17 aa, Artificial Sequence
  Cyclic GFR-binding peptide
QLRPVQVRKIDDSSNVI

SEQ ID NO: 11791 - protein, 21 aa, Artificial Sequence
  Cyclic GFR-binding peptide
  MOD_RES (6)..(7): Xaa is C or S
ASAAPXXVPQALSNITIQIMV

SEQ ID NO: 11792 - protein, 13 aa, Artificial Sequence
  Cyclic GFR-binding peptide
APTQLRSVKVAKV

SEQ ID NO: 11793 - protein, 23 aa, Artificial Sequence
  Cyclic GFR-binding peptide
  MOD_RES (6)..(7): Xaa is C or S
SIPKAXXVPTELRSVKMAKVDEY

SEQ ID NO: 11794 - protein, 19 aa, Artificial Sequence
  Cyclic GFR-binding peptide
PTELSNITMQIMDEYDKVV

SEQ ID NO: 11795 - protein, 15 aa, Artificial Sequence
  Cyclic GFR-binding peptide
  MOD_RES (1)..(2): Xaa is C or S
XXAPTQLRSVKVAKV

SEQ ID NO: 11796 - protein, 25 aa, Artificial Sequence
  Cyclic GFR-binding peptide
  MOD_RES (7)..(7): Xaa is C or S
HVTKPTXAPTKLSNITVQIMDDSSN

SEQ ID NO: 11797 - protein, 23 aa, Artificial Sequence
  Cyclic GFR-binding peptide
  MOD_RES (5)..(5): Xaa is C or S
SSVKXQPSRVHHEPLPVVYYEYV

SEQ ID NO: 11798 - protein, 17 aa, Artificial Sequence
  Cyclic GFR-binding peptide
  MOD_RES (3)..(4): Xaa is C or S
SPXXVPQDLSNITIQIM

SEQ ID NO: 11799 - protein, 24 aa, Artificial Sequence
  Cyclic GFR-binding peptide
  MOD_RES (6)..(7): Xaa is C or S
ASASPXXVPQDLSNITIQIMVGRT

SEQ ID NO: 11800 - protein, 21 aa, Artificial Sequence
  Cyclic GFR-binding peptide
  MOD_RES (6)..(7): Xaa is C or S
KIPKAXXVPTELRPVQMRKID

SEQ ID NO: 11801 - protein, 13 aa, Artificial Sequence
  Cyclic GFR-binding peptide
VPQDLRPVQIRKI

SEQ ID NO: 11802 - protein, 15 aa, Artificial Sequence
  Cyclic GFR-binding peptide
  MOD_RES (1)..(2): Xaa is C or S
XXVPQDLRPVQIRKI

SEQ ID NO: 11803 - protein, 15 aa, Artificial Sequence
  Cyclic GFR-binding peptide
  MOD_RES (1)..(2): Xaa is C or S
XXVPTELSNITMQIM

SEQ ID NO: 11804 - protein, 17 aa, Artificial Sequence
  Cyclic GFR-binding peptide
DLRPVQIRKIVGRTPKV

SEQ ID NO: 11805 - protein, 13 aa, Artificial Sequence
  Cyclic GFR-binding peptide
VPTEEEPLTMLYY

SEQ ID NO: 11806 - protein, 18 aa, Artificial Sequence
  Cyclic GFR-binding peptide
QALSNITIQIMVGRKPKV

SEQ ID NO: 11807 - protein, 16 aa, Artificial Sequence
  Cyclic GFR-binding peptide
LRPVQIRKIIGKTPKI

SEQ ID NO: 11808 - protein, 22 aa, Artificial Sequence
  Cyclic GFR-binding peptide
  MOD_RES (5)..(5): Xaa is C or S
SSVKXQPSRVHHEPLTVLYYEY

SEQ ID NO: 11809 - protein, 15 aa, Artificial Sequence
  Cyclic GFR-binding peptide
RPVQIRKIVGRTPKV

SEQ ID NO: 11810 - protein, 17 aa, Artificial Sequence
  Cyclic GFR-binding peptide
  MOD_RES (3)..(4): Xaa is C or S
KPXXAPTQLRSVKVAKV

SEQ ID NO: 11811 - protein, 15 aa, Artificial Sequence
  Cyclic GFR-binding peptide
  MOD_RES (1)..(2): Xaa is C or S
XXVPQDLRSVKIAKV

SEQ ID NO: 11812 - protein, 19 aa, Artificial Sequence
  Cyclic GFR-binding peptide
  MOD_RES (5)..(6): Xaa is C or S
IPKAXXVPTELRPVQMRKI

SEQ ID NO: 11813 - protein, 26 aa, Artificial Sequence
  Cyclic GFR-binding peptide
  MOD_RES (6)..(7): Xaa is C or S
SIPKAXXVPTELRSVKMAKVDEYDKV

SEQ ID NO: 11814 - protein, 18 aa, Artificial Sequence
  Cyclic GFR-binding peptide
HEPLTVLYYEYVRKKPKL

SEQ ID NO: 11815 - protein, 18 aa, Artificial Sequence
  Cyclic GFR-binding peptide
QALRSVKIAKVVGRKPKV

SEQ ID NO: 11816 - protein, 18 aa, Artificial Sequence
  Cyclic GFR-binding peptide
  MOD_RES (5)..(5): Xaa is C or S
TKPTXAPTKLRSVKVAKV

SEQ ID NO: 11817 - protein, 17 aa, Artificial Sequence
  Cyclic GFR-binding peptide
  MOD_RES (3)..(4): Xaa is C or S
SPXXVSQDLRPVQIRKI

SEQ ID NO: 11818 - protein, 26 aa, Artificial Sequence
  Cyclic GFR-binding peptide
  MOD_RES (6)..(7): Xaa is C or S
ASASPXXVSQDLSNITIQIMIGKTPK

SEQ ID NO: 11819 - protein, 19 aa, Artificial Sequence
  Cyclic GFR-binding peptide
  MOD_RES (5)..(6): Xaa is C or S
SASPXXVPQDLRPVQIRKI

SEQ ID NO: 11820 - protein, 16 aa, Artificial Sequence
  Cyclic GFR-binding peptide
  MOD_RES (3)..(3): Xaa is C or S
PTXAPTKLRSVKVAKV

SEQ ID NO: 11821 - protein, 22 aa, Artificial Sequence
  Cyclic GFR-binding peptide
  MOD_RES (6)..(7): Xaa is C or S
ASAAPXXVPQALRPVQIRKIVG

SEQ ID NO: 11822 - protein, 21 aa, Artificial Sequence
  Cyclic GFR-binding peptide
  MOD_RES (6)..(7): Xaa is C or S
ASAAPXXVPQALRPVQIRKIV

SEQ ID NO: 11823 - protein, 15 aa, Artificial Sequence
  Cyclic GFR-binding peptide
RSVKMAKVDENEKVV

SEQ ID NO: 11824 - protein, 17 aa, Artificial Sequence
  Cyclic GFR-binding peptide
  MOD_RES (4)..(4): Xaa is C or S
GLEXVPTEEEPLTMLYY

SEQ ID NO: 11825 - protein, 16 aa, Artificial Sequence
  Cyclic GFR-binding peptide
  MOD_RES (2)..(3): Xaa is C or S
PXXAPTKLRPVQVRKI

SEQ ID NO: 11826 - protein, 13 aa, Artificial Sequence
  Cyclic GFR-binding peptide
VPQDLRSVKIAKV

SEQ ID NO: 11827 - protein, 22 aa, Artificial Sequence
  Cyclic GFR-binding peptide
  MOD_RES (6)..(7): Xaa is C or S
ASAAPXXVPQALSNITIQIMVG

SEQ ID NO: 11828 - protein, 15 aa, Artificial Sequence
  Cyclic GFR-binding peptide
RSVKMAKVDEYDKVV

SEQ ID NO: 11829 - protein, 18 aa, Artificial Sequence
  Cyclic GFR-binding peptide
HEPLPVVYYEYVRKKPKL

SEQ ID NO: 11830 - protein, 15 aa, Artificial Sequence
  Cyclic GFR-binding peptide
RPVQVRKIDDSSNVI

SEQ ID NO: 11831 - protein, 26 aa, Artificial Sequence
  Cyclic GFR-binding peptide
  MOD_RES (6)..(7): Xaa is C or S
ASASPXXVPQDLSNITIQIMVGRTPK

SEQ ID NO: 11832 - protein, 16 aa, Artificial Sequence
  Cyclic GFR-binding peptide
  MOD_RES (2)..(3): Xaa is C or S
PXXAPTKLRSVKVAKV

SEQ ID NO: 11833 - protein, 23 aa, Artificial Sequence
  Cyclic GFR-binding peptide
  MOD_RES (6)..(7): Xaa is C or S
YVPKPXXAPTKLRSVKVAKVDDS

SEQ ID NO: 11834 - protein, 17 aa, Artificial Sequence
  Cyclic GFR-binding peptide
  MOD_RES (3)..(4): Xaa is C or S
SPXXVSQDLSNITIQIM

SEQ ID NO: 11835 - protein, 16 aa, Artificial Sequence
  Cyclic GFR-binding peptide
  MOD_RES (3)..(3): Xaa is C or S
PTXAPTKLRPVQVRKI

SEQ ID NO: 11836 - protein, 18 aa, Artificial Sequence
  Cyclic GFR-binding peptide
QDLRSVKIAKVVGRTPKV

SEQ ID NO: 11837 - protein, 25 aa, Artificial Sequence
  Cyclic GFR-binding peptide
  MOD_RES (6)..(7): Xaa is C or S
SIPKAXXVPTELRSVKMAKVDEYDK

SEQ ID NO: 11838 - protein, 15 aa, Artificial Sequence
  Cyclic GFR-binding peptide
  MOD_RES (1)..(2): Xaa is C or S
XXVPQALRSVKIAKV

SEQ ID NO: 11839 - protein, 13 aa, Artificial Sequence
  Cyclic GFR-binding peptide
VPTELSNITMQIM

SEQ ID NO: 11840 - protein, 29 aa, Artificial Sequence
  Cyclic GFR-binding peptide
  MOD_RES (5)..(5): Xaa is C or S
RNVQXRPTQVQLEPLPVVYYEIVRKKPIF

SEQ ID NO: 11841 - protein, 26 aa, Artificial Sequence
  Cyclic GFR-binding peptide
  MOD_RES (6)..(7): Xaa is C or S
YVPKPXXAPTKLRSVKVAKVDDSSNV

SEQ ID NO: 11842 - protein, 15 aa, Artificial Sequence
  Cyclic GFR-binding peptide
  MOD_RES (1)..(2): Xaa is C or S
XXVSQDLRPVQIRKI

SEQ ID NO: 11843 - protein, 20 aa, Artificial Sequence
  Cyclic GFR-binding peptide
  MOD_RES (6)..(7): Xaa is C or S
YVPKPXXAPTKLRPVQVRKI

SEQ ID NO: 11844 - protein, 22 aa, Artificial Sequence
  Cyclic GFR-binding peptide
  MOD_RES (7)..(7): Xaa is C or S
HVTKPTXAPTKLSNITVQIMDD

SEQ ID NO: 11845 - protein, 24 aa, Artificial Sequence
  Cyclic GFR-binding peptide
  MOD_RES (7)..(7): Xaa is C or S
HVTKPTXAPTKLRPVQVRKIDDSS

SEQ ID NO: 11846 - protein, 26 aa, Artificial Sequence
  Cyclic GFR-binding peptide
  MOD_RES (6)..(7): Xaa is C or S
YVPKPXXAPTKLRPVQVRKIDDSSNV

SEQ ID NO: 11847 - protein, 15 aa, Artificial Sequence
  Cyclic GFR-binding peptide
SNITMQIMDEYDKVV

SEQ ID NO: 11848 - protein, 14 aa, Artificial Sequence
  Cyclic GFR-binding peptide
  MOD_RES (1)..(1): Xaa is C or S
XVSQDLRSVKIAKV

SEQ ID NO: 11849 - protein, 27 aa, Artificial Sequence
  Cyclic GFR-binding peptide
  MOD_RES (6)..(7): Xaa is C or S
YVPKPXXAPTKLRPVQVRKIDDSSNVI

SEQ ID NO: 11850 - protein, 26 aa, Artificial Sequence
  Cyclic GFR-binding peptide
  MOD_RES (5)..(5): Xaa is C or S
RNVQXRPTQVQLEPLPVVYYEIVRKK

SEQ ID NO: 11851 - protein, 13 aa, Artificial Sequence
  Cyclic GFR-binding peptide
VSQDLRPVQIRKI

SEQ ID NO: 11852 - protein, 19 aa, Artificial Sequence
  Cyclic GFR-binding peptide
  MOD_RES (5)..(6): Xaa is C or S
SAAPXXVPQALSNITIQIM

SEQ ID NO: 11853 - protein, 18 aa, Artificial Sequence
  Cyclic GFR-binding peptide
QDLSNITIQIMVGRTPKV

SEQ ID NO: 11854 - protein, 26 aa, Artificial Sequence
  Cyclic GFR-binding peptide
  MOD_RES (6)..(7): Xaa is C or S
ASAAPXXVPQALRSVKIAKVVGRKPK

SEQ ID NO: 11855 - protein, 17 aa, Artificial Sequence
  Cyclic GFR-binding peptide
  MOD_RES (3)..(4): Xaa is C or S
SPXXVPQDLRPVQIRKI

SEQ ID NO: 11856 - protein, 13 aa, Artificial Sequence
  Cyclic GFR-binding peptide
VPTEEEPLPMVYY

SEQ ID NO: 11857 - protein, 22 aa, Artificial Sequence
  Cyclic GFR-binding peptide
  MOD_RES (6)..(7): Xaa is C or S
SIPKAXXVPTELRPVQMRKIDE

SEQ ID NO: 11858 - protein, 13 aa, Artificial Sequence
  Cyclic GFR-binding peptide
VPQALRSVKIAKV

SEQ ID NO: 11859 - protein, 19 aa, Artificial Sequence
  Cyclic GFR-binding peptide
PTELRPVQMRKIDENEKVV

SEQ ID NO: 11860 - protein, 19 aa, Artificial Sequence
  Cyclic GFR-binding peptide
  MOD_RES (5)..(6): Xaa is C or S
SASPXXVPQDLRSVKIAKV

SEQ ID NO: 11861 - protein, 26 aa, Artificial Sequence
  Cyclic GFR-binding peptide
  MOD_RES (6)..(7): Xaa is C or S
TVPKPXXAPTQLRPVQVRKIDDSSNV

SEQ ID NO: 11862 - protein, 21 aa, Artificial Sequence
  Cyclic GFR-binding peptide
  MOD_RES (5)..(5): Xaa is C or S
SSVKXQPSRVHHEPLTVLYYE

SEQ ID NO: 11863 - protein, 21 aa, Artificial Sequence
  Cyclic GFR-binding peptide
  MOD_RES (7)..(7): Xaa is C or S
HVTKPTXAPTKLSNITVQIMD

SEQ ID NO: 11864 - protein, 17 aa, Artificial Sequence
  Cyclic GFR-binding peptide
  MOD_RES (4)..(4): Xaa is C or S
GLEXVPTEEEPLPMVYY

SEQ ID NO: 11865 - protein, 23 aa, Artificial Sequence
  Cyclic GFR-binding peptide
  MOD_RES (6)..(7): Xaa is C or S
YVPKPXXAPTKLSNITVQIMDDS

SEQ ID NO: 11866 - protein, 25 aa, Artificial Sequence
  Cyclic GFR-binding peptide
  MOD_RES (6)..(7): Xaa is C or S
ASASPXXVSQDLRPVQIRKIIGKTP

SEQ ID NO: 11867 - protein, 20 aa, Artificial Sequence
  Cyclic GFR-binding peptide
  MOD_RES (6)..(7): Xaa is C or S
SIPKAXXVPTELSNITMQIM

SEQ ID NO: 11868 - protein, 21 aa, Artificial Sequence
  Cyclic GFR-binding peptide
PTEEEPLTMLYYRIKPHQGQH

SEQ ID NO: 11869 - protein, 17 aa, Artificial Sequence
  Cyclic GFR-binding peptide
  MOD_RES (3)..(4): Xaa is C or S
KPXXAPTKLRSVKVAKV

SEQ ID NO: 11870 - protein, 15 aa, Artificial Sequence
  Cyclic GFR-binding peptide
  MOD_RES (2)..(2): Xaa is C or S
TXAPTKLSNITVQIM

SEQ ID NO: 11871 - protein, 25 aa, Artificial Sequence
  Cyclic GFR-binding peptide
  MOD_RES (5)..(5): Xaa is C or S
SSVKXQPSRVHHEPLPVVYYEYVRK

SEQ ID NO: 11872 - protein, 20 aa, Artificial Sequence
  Cyclic GFR-binding peptide
  MOD_RES (6)..(7): Xaa is C or S
ASAAPXXVPQALRSVKIAKV

SEQ ID NO: 11873 - protein, 27 aa, Artificial Sequence
  Cyclic GFR-binding peptide
  MOD_RES (6)..(7): Xaa is C or S
YVPKPXXAPTKLSNITVQIMDDSSNVI

SEQ ID NO: 11874 - protein, 23 aa, Artificial Sequence
  Cyclic GFR-binding peptide
  MOD_RES (6)..(7): Xaa is C or S
ASASPXXVPQDLRPVQIRKIVGR

SEQ ID NO: 11875 - protein, 27 aa, Artificial Sequence
  Cyclic GFR-binding peptide
  MOD_RES (5)..(5): Xaa is C or S
RNVQXRPTQVQLEPLTVLYYEIVRKKP

SEQ ID NO: 11876 - protein, 22 aa, Artificial Sequence
  Cyclic GFR-binding peptide
  MOD_RES (6)..(7): Xaa is C or S
ASASPXXVPQDLRPVQIRKIVG

SEQ ID NO: 11877 - protein, 23 aa, Artificial Sequence
  Cyclic GFR-binding peptide
  MOD_RES (6)..(7): Xaa is C or S
TVPKPXXAPTQLSNITVQIMDDS

SEQ ID NO: 11878 - protein, 17 aa, Artificial Sequence
  Cyclic GFR-binding peptide
DLRPVQIRKIIGKTPKI

SEQ ID NO: 11879 - protein, 20 aa, Artificial Sequence
  Cyclic GFR-binding peptide
  MOD_RES (6)..(7): Xaa is C or S
YVPKPXXAPTKLSNITVQIM

SEQ ID NO: 11880 - protein, 18 aa, Artificial Sequence
  Cyclic GFR-binding peptide
  MOD_RES (4)..(5): Xaa is C or S
ASPXXVPQDLRPVQIRKI

SEQ ID NO: 11881 - protein, 17 aa, Artificial Sequence
  Cyclic GFR-binding peptide
  MOD_RES (2)..(2): Xaa is C or S
QXRPTQVQLEPLTVLYY

SEQ ID NO: 11882 - protein, 23 aa, Artificial Sequence
  Cyclic GFR-binding peptide
  MOD_RES (7)..(7): Xaa is C or S
HVTKPTXAPTKLRPVQVRKIDDS

SEQ ID NO: 11883 - protein, 18 aa, Artificial Sequence
  Cyclic GFR-binding peptide
  MOD_RES (3)..(3): Xaa is C or S
VQXRPTQVQLEPLTVLYY

SEQ ID NO: 11884 - protein, 23 aa, Artificial Sequence
  Cyclic GFR-binding peptide
  MOD_RES (6)..(7): Xaa is C or S
KIPKAXXVPTELRPVQMRKIDEN

SEQ ID NO: 11885 - protein, 18 aa, Artificial Sequence
  Cyclic GFR-binding peptide
TKLSNITVQIMDDSSNVI

SEQ ID NO: 11886 - protein, 20 aa, Artificial Sequence
  Cyclic GFR-binding peptide
  MOD_RES (5)..(5): Xaa is C or S
RNVQXRPTQVQLEPLTVLYY

SEQ ID NO: 11887 - protein, 16 aa, Artificial Sequence
  Cyclic GFR-binding peptide
LRSVKIAKVVGRTPKV

SEQ ID NO: 11888 - protein, 22 aa, Artificial Sequence
  Cyclic GFR-binding peptide
  MOD_RES (6)..(7): Xaa is C or S
YVPKPXXAPTKLSNITVQIMDD

SEQ ID NO: 11889 - protein, 17 aa, Artificial Sequence
  Cyclic GFR-binding peptide
EPLTMLYYRIKPHQGQH

SEQ ID NO: 11890 - protein, 14 aa, Artificial Sequence
  Cyclic GFR-binding peptide
  MOD_RES (1)..(1): Xaa is C or S
XAPTQLSNITVQIM

SEQ ID NO: 11891 - protein, 18 aa, Artificial Sequence
  Cyclic GFR-binding peptide
TQLSNITVQIMDDSSNVI

SEQ ID NO: 11892 - protein, 27 aa, Artificial Sequence
  Cyclic GFR-binding peptide
  MOD_RES (6)..(7): Xaa is C or S
ASASPXXVPQDLSNITIQIMVGRTPKV

SEQ ID NO: 11893 - protein, 19 aa, Artificial Sequence
  Cyclic GFR-binding peptide
  MOD_RES (5)..(6): Xaa is C or S
SASPXXVPQDLSNITIQIM

SEQ ID NO: 11894 - protein, 16 aa, Artificial Sequence
  Cyclic GFR-binding peptide
LRPVQIRKIVGRTPKV

SEQ ID NO: 11895 - protein, 17 aa, Artificial Sequence
  Cyclic GFR-binding peptide
  MOD_RES (3)..(4): Xaa is C or S
APXXVPQALRSVKIAKV

SEQ ID NO: 11896 - protein, 13 aa, Artificial Sequence
  Cyclic GFR-binding peptide
SRVHHEPLTVLYY

SEQ ID NO: 11897 - protein, 19 aa, Artificial Sequence
  Cyclic GFR-binding peptide
  MOD_RES (5)..(6): Xaa is C or S
VPKPXXAPTQLSNITVQIM

SEQ ID NO: 11898 - protein, 22 aa, Artificial Sequence
  Cyclic GFR-binding peptide
  MOD_RES (6)..(7): Xaa is C or S
YVPKPXXAPTKLRSVKVAKVDD

SEQ ID NO: 11899 - protein, 27 aa, Artificial Sequence
  Cyclic GFR-binding peptide
  MOD_RES (6)..(7): Xaa is C or S
ASASPXXVPQDLRPVQIRKIVGRTPKV

SEQ ID NO: 11900 - protein, 22 aa, Artificial Sequence
  Cyclic GFR-binding peptide
  MOD_RES (6)..(7): Xaa is C or S
ASASPXXVPQDLRSVKIAKVVG

SEQ ID NO: 11901 - protein, 20 aa, Artificial Sequence
  Cyclic GFR-binding peptide
  MOD_RES (6)..(7): Xaa is C or S
TVPKPXXAPTQLRPVQVRKI

SEQ ID NO: 11902 - protein, 16 aa, Artificial Sequence
  Cyclic GFR-binding peptide
  MOD_RES (2)..(3): Xaa is C or S
PXXAPTKLSNITVQIM

SEQ ID NO: 11903 - protein, 19 aa, Artificial Sequence
  Cyclic GFR-binding peptide
  MOD_RES (5)..(6): Xaa is C or S
VPKPXXAPTQLRPVQVRKI

SEQ ID NO: 11904 - protein, 20 aa, Artificial Sequence
  Cyclic GFR-binding peptide
  MOD_RES (5)..(5): Xaa is C or S
SSVKXQPSRVHHEPLTVLYY

SEQ ID NO: 11905 - protein, 26 aa, Artificial Sequence
  Cyclic GFR-binding peptide
  MOD_RES (6)..(7): Xaa is C or S
TVPKPXXAPTQLRSVKVAKVDDSSNV

SEQ ID NO: 11906 - protein, 15 aa, Artificial Sequence
  Cyclic GFR-binding peptide
  MOD_RES (1)..(2): Xaa is C or S
XXAPTQLSNITVQIM

SEQ ID NO: 11907 - protein, 16 aa, Artificial Sequence
  Cyclic GFR-binding peptide
LRPVQIRKIVGRKPKV

SEQ ID NO: 11908 - protein, 16 aa, Artificial Sequence
  Cyclic GFR-binding peptide
  MOD_RES (2)..(3): Xaa is C or S
PXXVSQDLRPVQIRKI

SEQ ID NO: 11909 - protein, 13 aa, Artificial Sequence
  Cyclic GFR-binding peptide
VSQDLSNITIQIM

SEQ ID NO: 11910 - protein, 27 aa, Artificial Sequence
  Cyclic GFR-binding peptide
  MOD_RES (7)..(7): Xaa is C or S
HVTKPTXAPTKLRSVKVAKVDDSSNVI

SEQ ID NO: 11911 - protein, 18 aa, Artificial Sequence
  Cyclic GFR-binding peptide
  MOD_RES (3)..(3): Xaa is C or S
VQXRPTQVQLEPLPVVYY

SEQ ID NO: 11912 - protein, 19 aa, Artificial Sequence
  Cyclic GFR-binding peptide
  MOD_RES (4)..(4): Xaa is C or S
SVKXQPSRVHHEPLPVVYY

SEQ ID NO: 11913 - protein, 25 aa, Artificial Sequence
  Cyclic GFR-binding peptide
  MOD_RES (7)..(7): Xaa is C or S
NDEGLEXVPTEEEPLPMVYYRIKPH

SEQ ID NO: 11914 - protein, 15 aa, Artificial Sequence
  Cyclic GFR-binding peptide
RPVQMRKIDENEKVV

SEQ ID NO: 11915 - protein, 23 aa, Artificial Sequence
  Cyclic GFR-binding peptide
  MOD_RES (6)..(7): Xaa is C or S
TVPKPXXAPTQLRPVQVRKIDDS

SEQ ID NO: 11916 - protein, 19 aa, Artificial Sequence
  Cyclic GFR-binding peptide
PTKLRPVQVRKIDDSSNVI

SEQ ID NO: 11917 - protein, 18 aa, Artificial Sequence
  Cyclic GFR-binding peptide
  MOD_RES (4)..(5): Xaa is C or S
ASPXXVPQDLSNITIQIM

SEQ ID NO: 11918 - protein, 19 aa, Artificial Sequence
  Cyclic GFR-binding peptide
PTQLRPVQVRKIDDSSNVI

SEQ ID NO: 11919 - protein, 16 aa, Artificial Sequence
  Cyclic GFR-binding peptide
  MOD_RES (3)..(3): Xaa is C or S
PTXAPTKLSNITVQIM

SEQ ID NO: 11920 - protein, 16 aa, Artificial Sequence
  Cyclic GFR-binding peptide
LSNITMQIMDEYDKVV

SEQ ID NO: 11921 - protein, 18 aa, Artificial Sequence
  Cyclic GFR-binding peptide
EEPLTMLYYRIKPHQGQH

SEQ ID NO: 11922 - protein, 22 aa, Artificial Sequence
  Cyclic GFR-binding peptide
  MOD_RES (6)..(7): Xaa is C or S
YVPKPXXAPTKLRPVQVRKIDD

SEQ ID NO: 11923 - protein, 13 aa, Artificial Sequence
  Cyclic GFR-binding peptide
VPQALRPVQIRKI

SEQ ID NO: 11924 - protein, 26 aa, Artificial Sequence
  Cyclic GFR-binding peptide
  MOD_RES (6)..(7): Xaa is C or S
KIPKAXXVPTELSNITMQIMDENEKV

SEQ ID NO: 11925 - protein, 17 aa, Artificial Sequence
  Cyclic GFR-binding peptide
ELRSVKMAKVDEYDKVV

SEQ ID NO: 11926 - protein, 23 aa, Artificial Sequence
  Cyclic GFR-binding peptide
  MOD_RES (6)..(7): Xaa is C or S
YVPKPXXAPTKLRPVQVRKIDDS

SEQ ID NO: 11927 - protein, 19 aa, Artificial Sequence
  Cyclic GFR-binding peptide
  MOD_RES (5)..(6): Xaa is C or S
VPKPXXAPTKLSNITVQIM

SEQ ID NO: 11928 - protein, 23 aa, Artificial Sequence
  Cyclic GFR-binding peptide
  MOD_RES (6)..(7): Xaa is C or S
ASASPXXVPQDLRSVKIAKVVGR

SEQ ID NO: 11929 - protein, 18 aa, Artificial Sequence
  Cyclic GFR-binding peptide
  MOD_RES (4)..(5): Xaa is C or S
PKPXXAPTQLRSVKVAKV

SEQ ID NO: 11930 - protein, 19 aa, Artificial Sequence
  Cyclic GFR-binding peptide
PTKLSNITVQIMDDSSNVI

SEQ ID NO: 11931 - protein, 27 aa, Artificial Sequence
  Cyclic GFR-binding peptide
  MOD_RES (6)..(7): Xaa is C or S
TVPKPXXAPTQLRPVQVRKIDDSSNVI

SEQ ID NO: 11932 - protein, 17 aa, Artificial Sequence
  Cyclic GFR-binding peptide
ELRPVQMRKIDEYDKVV

SEQ ID NO: 11933 - protein, 19 aa, Artificial Sequence
  Cyclic GFR-binding peptide
PTQLSNITVQIMDDSSNVI

SEQ ID NO: 11934 - protein, 20 aa, Artificial Sequence
  Cyclic GFR-binding peptide
  MOD_RES (6)..(7): Xaa is C or S
ASASPXXVSQDLSNITIQIM

SEQ ID NO: 11935 - protein, 27 aa, Artificial Sequence
  Cyclic GFR-binding peptide
  MOD_RES (6)..(7): Xaa is C or S
SIPKAXXVPTELRSVKMAKVDEYDKVV

SEQ ID NO: 11936 - protein, 20 aa, Artificial Sequence
  Cyclic GFR-binding peptide
  MOD_RES (7)..(7): Xaa is C or S
HVTKPTXAPTKLRPVQVRKI

SEQ ID NO: 11937 - protein, 29 aa, Artificial Sequence
  Cyclic GFR-binding peptide
  MOD_RES (5)..(5): Xaa is C or S
RNVQXRPTQVQLEPLTVLYYEIVRKKPIF

SEQ ID NO: 11938 - protein, 26 aa, Artificial Sequence
  Cyclic GFR-binding peptide
  MOD_RES (6)..(7): Xaa is C or S
ASAAPXXVPQALSNITIQIMVGRKPK

SEQ ID NO: 11939 - protein, 16 aa, Artificial Sequence
  Cyclic GFR-binding peptide
  MOD_RES (2)..(3): Xaa is C or S
PXXAPTQLRPVQVRKI

SEQ ID NO: 11940 - protein, 24 aa, Artificial Sequence
  Cyclic GFR-binding peptide
  MOD_RES (6)..(7): Xaa is C or S
ASASPXXVSQDLRPVQIRKIIGKT

SEQ ID NO: 11941 - protein, 16 aa, Artificial Sequence
  Cyclic GFR-binding peptide
LRSVKIAKVVGRKPKV

SEQ ID NO: 11942 - protein, 17 aa, Artificial Sequence
  Cyclic GFR-binding peptide
  MOD_RES (2)..(2): Xaa is C or S
QXRPTQVQLEPLPVVYY

SEQ ID NO: 11943 - protein, 25 aa, Artificial Sequence
  Cyclic GFR-binding peptide
  MOD_RES (6)..(7): Xaa is C or S
TVPKPXXAPTQLRPVQVRKIDDSSN

SEQ ID NO: 11944 - protein, 17 aa, Artificial Sequence
  Cyclic GFR-binding peptide
DLSNITIQIMIGKTPKI

SEQ ID NO: 11945 - protein, 15 aa, Artificial Sequence
  Cyclic GFR-binding peptide
  MOD_RES (2)..(2): Xaa is C or S
TXAPTKLRPVQVRKI

SEQ ID NO: 11946 - protein, 14 aa, Artificial Sequence
  Cyclic GFR-binding peptide
  MOD_RES (1)..(1): Xaa is C or S
XVPQDLRSVKIAKV

SEQ ID NO: 11947 - protein, 18 aa, Artificial Sequence
  Cyclic GFR-binding peptide
LEPLPVVYYEIVRKKPIF

SEQ ID NO: 11948 - protein, 27 aa, Artificial Sequence
  Cyclic GFR-binding peptide
  MOD_RES (6)..(7): Xaa is C or S
TVPKPXXAPTQLRSVKVAKVDDSSNVI

SEQ ID NO: 11949 - protein, 29 aa, Artificial Sequence
  Cyclic GFR-binding peptide
  MOD_RES (5)..(5): Xaa is C or S
SSVKXQPSRVHHEPLPVVYYEYVRKKPKL

SEQ ID NO: 11950 - protein, 13 aa, Artificial Sequence
  Cyclic GFR-binding peptide
VPQALSNITIQIM

SEQ ID NO: 11951 - protein, 21 aa, Artificial Sequence
  Cyclic GFR-binding peptide
QVQLEPLPVVYYEIVRKKPIF

SEQ ID NO: 11952 - protein, 14 aa, Artificial Sequence
  Cyclic GFR-binding peptide
  MOD_RES (1)..(1): Xaa is C or S
XAPTQLRPVQVRKI

SEQ ID NO: 11953 - protein, 20 aa, Artificial Sequence
  Cyclic GFR-binding peptide
VHHEPLTVLYYEYVRKKPKL

SEQ ID NO: 11954 - protein, 19 aa, Artificial Sequence
  Cyclic GFR-binding peptide
  MOD_RES (5)..(6): Xaa is C or S
SAAPXXVPQALRPVQIRKI

SEQ ID NO: 11955 - protein, 15 aa, Artificial Sequence
  Cyclic GFR-binding peptide
RPVQMRKIDEYDKVV

SEQ ID NO: 11956 - protein, 23 aa, Artificial Sequence
  Cyclic GFR-binding peptide
  MOD_RES (6)..(7): Xaa is C or S
KIPKAXXVPTELSNITMQIMDEN

SEQ ID NO: 11957 - protein, 16 aa, Artificial Sequence
  Cyclic GFR-binding peptide
LRSVKIAKVIGKTPKI

SEQ ID NO: 11958 - protein, 26 aa, Artificial Sequence
  Cyclic GFR-binding peptide
  MOD_RES (6)..(7): Xaa is C or S
TVPKPXXAPTQLSNITVQIMDDSSNV

SEQ ID NO: 11959 - protein, 23 aa, Artificial Sequence
  Cyclic GFR-binding peptide
  MOD_RES (5)..(5): Xaa is C or S
RNVQXRPTQVQLEPLTVLYYEIV

SEQ ID NO: 11960 - protein, 17 aa, Artificial Sequence
  Cyclic GFR-binding peptide
EPLPVVYYEYVRKKPKL

SEQ ID NO: 11961 - protein, 21 aa, Artificial Sequence
  Cyclic GFR-binding peptide
  MOD_RES (7)..(7): Xaa is C or S
NDEGLEXVPTEEEPLPMVYYR

SEQ ID NO: 11962 - protein, 21 aa, Artificial Sequence
  Cyclic GFR-binding peptide
  MOD_RES (6)..(7): Xaa is C or S
TVPKPXXAPTQLRPVQVRKID

SEQ ID NO: 11963 - protein, 20 aa, Artificial Sequence
  Cyclic GFR-binding peptide
  MOD_RES (6)..(7): Xaa is C or S
SIPKAXXVPTELRPVQMRKI

SEQ ID NO: 11964 - protein, 19 aa, Artificial Sequence
  Cyclic GFR-binding peptide
HHEPLPVVYYEYVRKKPKL

SEQ ID NO: 11965 - protein, 15 aa, Artificial Sequence
  Cyclic GFR-binding peptide
RSVKIAKVVGRTPKV

SEQ ID NO: 11966 - protein, 22 aa, Artificial Sequence
  Cyclic GFR-binding peptide
  MOD_RES (7)..(7): Xaa is C or S
NDEGLEXVPTEEEPLPMVYYRI

SEQ ID NO: 11967 - protein, 22 aa, Artificial Sequence
  Cyclic GFR-binding peptide
  MOD_RES (6)..(7): Xaa is C or S
TVPKPXXAPTQLRPVQVRKIDD

SEQ ID NO: 11968 - protein, 15 aa, Artificial Sequence
  Cyclic GFR-binding peptide
RSVKVAKVDDSSNVI

SEQ ID NO: 11969 - protein, 25 aa, Artificial Sequence
  Cyclic GFR-binding peptide
  MOD_RES (6)..(7): Xaa is C or S
KIPKAXXVPTELRPVQMRKIDENEK

SEQ ID NO: 11970 - protein, 21 aa, Artificial Sequence
  Cyclic GFR-binding peptide
  MOD_RES (6)..(7): Xaa is C or S
SIPKAXXVPTELRPVQMRKID

SEQ ID NO: 11971 - protein, 15 aa, Artificial Sequence
  Cyclic GFR-binding peptide
  MOD_RES (1)..(2): Xaa is C or S
XXAPTKLRPVQVRKI

SEQ ID NO: 11972 - protein, 18 aa, Artificial Sequence
  Cyclic GFR-binding peptide
QALRPVQIRKIVGRKPKV

SEQ ID NO: 11973 - protein, 19 aa, Artificial Sequence
  Cyclic GFR-binding peptide
  MOD_RES (6)..(6): Xaa is C or S
VTKPTXAPTKLSNITVQIM

SEQ ID NO: 11974 - protein, 23 aa, Artificial Sequence
  Cyclic GFR-binding peptide
  MOD_RES (7)..(7): Xaa is C or S
HVTKPTXAPTKLSNITVQIMDDS

SEQ ID NO: 11975 - protein, 19 aa, Artificial Sequence
  Cyclic GFR-binding peptide
PQDLSNITIQIMVGRTPKV

SEQ ID NO: 11976 - protein, 25 aa, Artificial Sequence
  Cyclic GFR-binding peptide
  MOD_RES (6)..(7): Xaa is C or S
ASASPXXVPQDLRPVQIRKIVGRTP

SEQ ID NO: 11977 - protein, 24 aa, Artificial Sequence
  Cyclic GFR-binding peptide
  MOD_RES (6)..(7): Xaa is C or S
TVPKPXXAPTQLRSVKVAKVDDSS

SEQ ID NO: 11978 - protein, 22 aa, Artificial Sequence
  Cyclic GFR-binding peptide
  MOD_RES (6)..(7): Xaa is C or S
TVPKPXXAPTQLRSVKVAKVDD

SEQ ID NO: 11979 - protein, 18 aa, Artificial Sequence
  Cyclic GFR-binding peptide
  MOD_RES (4)..(5): Xaa is C or S
PKAXXVPTELRPVQMRKI

SEQ ID NO: 11980 - protein, 21 aa, Artificial Sequence
  Cyclic GFR-binding peptide
  MOD_RES (6)..(7): Xaa is C or S
YVPKPXXAPTKLSNITVQIMD

SEQ ID NO: 11981 - protein, 20 aa, Artificial Sequence
  Cyclic GFR-binding peptide
TEEEPLTMLYYRIKPHQGQH

SEQ ID NO: 11982 - protein, 20 aa, Artificial Sequence
  Cyclic GFR-binding peptide
  MOD_RES (6)..(7): Xaa is C or S
KIPKAXXVPTELSNITMQIM

SEQ ID NO: 11983 - protein, 18 aa, Artificial Sequence
  Cyclic GFR-binding peptide
  MOD_RES (4)..(5): Xaa is C or S
ASPXXVSQDLRPVQIRKI

SEQ ID NO: 11984 - protein, 15 aa, Artificial Sequence
  Cyclic GFR-binding peptide
  MOD_RES (1)..(2): Xaa is C or S
XXAPTKLSNITVQIM

SEQ ID NO: 11985 - protein, 20 aa, Artificial Sequence
  Cyclic GFR-binding peptide
  MOD_RES (6)..(7): Xaa is C or S
ASASPXXVSQDLRPVQIRKI

SEQ ID NO: 11986 - protein, 13 aa, Artificial Sequence
  Cyclic GFR-binding peptide
VPQDLSNITIQIM

SEQ ID NO: 11987 - protein, 20 aa, Artificial Sequence
  Cyclic GFR-binding peptide
  MOD_RES (5)..(5): Xaa is C or S
RNVQXRPTQVQLEPLPVVYY

SEQ ID NO: 11988 - protein, 19 aa, Artificial Sequence
  Cyclic GFR-binding peptide
  MOD_RES (5)..(6): Xaa is C or S
VPKPXXAPTKLRPVQVRKI

SEQ ID NO: 11989 - protein, 22 aa, Artificial Sequence
  Cyclic GFR-binding peptide
  MOD_RES (6)..(7): Xaa is C or S
TVPKPXXAPTQLSNITVQIMDD

SEQ ID NO: 11990 - protein, 17 aa, Artificial Sequence
  Cyclic GFR-binding peptide
ALRSVKIAKVVGRKPKV

SEQ ID NO: 11991 - protein, 17 aa, Artificial Sequence
  Cyclic GFR-binding peptide
  MOD_RES (4)..(4): Xaa is C or S
KPTXAPTKLRSVKVAKV

SEQ ID NO: 11992 - protein, 23 aa, Artificial Sequence
  Cyclic GFR-binding peptide
  MOD_RES (7)..(7): Xaa is C or S
NDEGLEXVPTEEEPLPMVYYRIK

SEQ ID NO: 11993 - protein, 22 aa, Artificial Sequence
  Cyclic GFR-binding peptide
  MOD_RES (6)..(7): Xaa is C or S
ASASPXXVPQDLSNITIQIMVG

SEQ ID NO: 11994 - protein, 21 aa, Artificial Sequence
  Cyclic GFR-binding peptide
  MOD_RES (6)..(7): Xaa is C or S
SIPKAXXVPTELRSVKMAKVD

SEQ ID NO: 11995 - protein, 20 aa, Artificial Sequence
  Cyclic GFR-binding peptide
  MOD_RES (6)..(7): Xaa is C or S
KIPKAXXVPTELRPVQMRKI

SEQ ID NO: 11996 - protein, 18 aa, Artificial Sequence
  Cyclic GFR-binding peptide
  MOD_RES (4)..(5): Xaa is C or S
ASPXXVSQDLSNITIQIM

SEQ ID NO: 11997 - protein, 26 aa, Artificial Sequence
  Cyclic GFR-binding peptide
  MOD_RES (6)..(7): Xaa is C or S
KIPKAXXVPTELRSVKMAKVDENEKV

SEQ ID NO: 11998 - protein, 24 aa, Artificial Sequence
  Cyclic GFR-binding peptide
  MOD_RES (6)..(7): Xaa is C or S
TVPKPXXAPTQLSNITVQIMDDSS

SEQ ID NO: 11999 - protein, 26 aa, Artificial Sequence
  Cyclic GFR-binding peptide
  MOD_RES (5)..(5): Xaa is C or S
SSVKXQPSRVHHEPLTVLYYEYVRKK

SEQ ID NO: 12000 - protein, 17 aa, Artificial Sequence
  Cyclic GFR-binding peptide
  MOD_RES (3)..(4): Xaa is C or S
KAXXVPTELRPVQMRKI

SEQ ID NO: 12001 - protein, 15 aa, Artificial Sequence
  Cyclic GFR-binding peptide
  MOD_RES (2)..(2): Xaa is C or S
EXVPTEEEPLPMVYY

SEQ ID NO: 12002 - protein, 21 aa, Artificial Sequence
  Cyclic GFR-binding peptide
  MOD_RES (6)..(7): Xaa is C or S
ASASPXXVSQDLRPVQIRKII

SEQ ID NO: 12003 - protein, 21 aa, Artificial Sequence
  Cyclic GFR-binding peptide
  MOD_RES (6)..(7): Xaa is C or S
TVPKPXXAPTQLRSVKVAKVD

SEQ ID NO: 12004 - protein, 21 aa, Artificial Sequence
  Cyclic GFR-binding peptide
  MOD_RES (6)..(7): Xaa is C or S
ASASPXXVPQDLRSVKIAKVV

SEQ ID NO: 12005 - protein, 17 aa, Artificial Sequence
  Cyclic GFR-binding peptide
  MOD_RES (2)..(2): Xaa is C or S
KXQPSRVHHEPLTVLYY

SEQ ID NO: 12006 - protein, 25 aa, Artificial Sequence
  Cyclic GFR-binding peptide
  MOD_RES (5)..(5): Xaa is C or S
SSVKXQPSRVHHEPLTVLYYEYVRK

SEQ ID NO: 12007 - protein, 17 aa, Artificial Sequence
  Cyclic GFR-binding peptide
ELRSVKMAKVDENEKVV

SEQ ID NO: 12008 - protein, 17 aa, Artificial Sequence
  Cyclic GFR-binding peptide
EPLTVLYYEIVRKKPIF

SEQ ID NO: 12009 - protein, 15 aa, Artificial Sequence
  Cyclic GFR-binding peptide
  MOD_RES (1)..(2): Xaa is C or S
XXAPTQLRPVQVRKI

SEQ ID NO: 12010 - protein, 19 aa, Artificial Sequence
  Cyclic GFR-binding peptide
PQALRSVKIAKVVGRKPKV

SEQ ID NO: 12011 - protein, 13 aa, Artificial Sequence
  Cyclic GFR-binding peptide
VPTELRSVKMAKV

SEQ ID NO: 12012 - protein, 27 aa, Artificial Sequence
  Cyclic GFR-binding peptide
  MOD_RES (6)..(7): Xaa is C or S
KIPKAXXVPTELSNITMQIMDENEKVV

SEQ ID NO: 12013 - protein, 22 aa, Artificial Sequence
  Cyclic GFR-binding peptide
  MOD_RES (6)..(7): Xaa is C or S
ASASPXXVSQDLRPVQIRKIIG

SEQ ID NO: 12014 - protein, 27 aa, Artificial Sequence
  Cyclic GFR-binding peptide
  MOD_RES (5)..(5): Xaa is C or S
SSVKXQPSRVHHEPLPVVYYEYVRKKP

SEQ ID NO: 12015 - protein, 19 aa, Artificial Sequence
  Cyclic GFR-binding peptide
  MOD_RES (4)..(4): Xaa is C or S
SVKXQPSRVHHEPLTVLYY

SEQ ID NO: 12016 - protein, 19 aa, Artificial Sequence
  Cyclic GFR-binding peptide
PTELSNITMQIMDENEKVV

SEQ ID NO: 12017 - protein, 17 aa, Artificial Sequence
  Cyclic GFR-binding peptide
DLSNITIQIMVGRTPKV

SEQ ID NO: 12018 - protein, 16 aa, Artificial Sequence
  Cyclic GFR-binding peptide
  MOD_RES (2)..(3): Xaa is C or S
PXXAPTQLSNITVQIM

SEQ ID NO: 12019 - protein, 20 aa, Artificial Sequence
  Cyclic GFR-binding peptide
  MOD_RES (7)..(7): Xaa is C or S
HVTKPTXAPTKLSNITVQIM

SEQ ID NO: 12020 - protein, 14 aa, Artificial Sequence
  Cyclic GFR-binding peptide
  MOD_RES (1)..(1): Xaa is C or S
XAPTKLRPVQVRKI

SEQ ID NO: 12021 - protein, 17 aa, Artificial Sequence
  Cyclic GFR-binding peptide
QLSNITVQIMDDSSNVI

SEQ ID NO: 12022 - protein, 17 aa, Artificial Sequence
  Cyclic GFR-binding peptide
EPLPMVYYRIKPHQGQH

SEQ ID NO: 12023 - protein, 15 aa, Artificial Sequence
  Cyclic GFR-binding peptide
RSVKIAKVIGKTPKI

SEQ ID NO: 12024 - protein, 26 aa, Artificial Sequence
  Cyclic GFR-binding peptide
  MOD_RES (7)..(7): Xaa is C or S
NDEGLEXVPTEEEPLPMVYYRIKPHQ

SEQ ID NO: 12025 - protein, 15 aa, Artificial Sequence
  Cyclic GFR-binding peptide
  MOD_RES (2)..(2): Xaa is C or S
TXAPTKLRSVKVAKV

SEQ ID NO: 12026 - protein, 26 aa, Artificial Sequence
  Cyclic GFR-binding peptide
  MOD_RES (7)..(7): Xaa is C or S
HVTKPTXAPTKLSNITVQIMDDSSNV

SEQ ID NO: 12027 - protein, 22 aa, Artificial Sequence
  Cyclic GFR-binding peptide
  MOD_RES (6)..(7): Xaa is C or S
ASASPXXVSQDLRSVKIAKVIG

SEQ ID NO: 12028 - protein, 26 aa, Artificial Sequence
  Cyclic GFR-binding peptide
  MOD_RES (6)..(7): Xaa is C or S
YVPKPXXAPTKLSNITVQIMDDSSNV

SEQ ID NO: 12029 - protein, 24 aa, Artificial Sequence
  Cyclic GFR-binding peptide
  MOD_RES (6)..(7): Xaa is C or S
SIPKAXXVPTELRSVKMAKVDEYD

SEQ ID NO: 12030 - protein, 19 aa, Artificial Sequence
  Cyclic GFR-binding peptide
  MOD_RES (6)..(6): Xaa is C or S
VTKPTXAPTKLRPVQVRKI

SEQ ID NO: 12031 - protein, 20 aa, Artificial Sequence
  Cyclic GFR-binding peptide
  MOD_RES (6)..(7): Xaa is C or S
ASAAPXXVPQALSNITIQIM

SEQ ID NO: 12032 - protein, 16 aa, Artificial Sequence
  Cyclic GFR-binding peptide
  MOD_RES (2)..(3): Xaa is C or S
PXXVSQDLRSVKIAKV

SEQ ID NO: 12033 - protein, 23 aa, Artificial Sequence
  Cyclic GFR-binding peptide
  MOD_RES (6)..(7): Xaa is C or S
ASAAPXXVPQALRSVKIAKVVGR

SEQ ID NO: 12034 - protein, 18 aa, Artificial Sequence
  Cyclic GFR-binding peptide
QDLRPVQIRKIIGKTPKI

SEQ ID NO: 12035 - protein, 17 aa, Artificial Sequence
  Cyclic GFR-binding peptide
KLSNITVQIMDDSSNVI

SEQ ID NO: 12036 - protein, 22 aa, Artificial Sequence
  Cyclic GFR-binding peptide
  MOD_RES (7)..(7): Xaa is C or S
NDEGLEXVPTEEEPLTMLYYRI

SEQ ID NO: 12037 - protein, 27 aa, Artificial Sequence
  Cyclic GFR-binding peptide
  MOD_RES (7)..(7): Xaa is C or S
NDEGLEXVPTEEEPLTMLYYRIKPHQG

SEQ ID NO: 12038 - protein, 24 aa, Artificial Sequence
  Cyclic GFR-binding peptide
  MOD_RES (6)..(7): Xaa is C or S
ASAAPXXVPQALRPVQIRKIVGRK

SEQ ID NO: 12039 - protein, 20 aa, Artificial Sequence
  Cyclic GFR-binding peptide
  MOD_RES (7)..(7): Xaa is C or S
HVTKPTXAPTKLRSVKVAKV

SEQ ID NO: 12040 - protein, 13 aa, Artificial Sequence
  Cyclic GFR-binding peptide
APTKLRSVKVAKV

SEQ ID NO: 12041 - protein, 16 aa, Artificial Sequence
  Cyclic GFR-binding peptide
LRPVQMRKIDENEKVV

SEQ ID NO: 12042 - protein, 25 aa, Artificial Sequence
  Cyclic GFR-binding peptide
  MOD_RES (6)..(7): Xaa is C or S
ASAAPXXVPQALRSVKIAKVVGRKP

SEQ ID NO: 12043 - protein, 26 aa, Artificial Sequence
  Cyclic GFR-binding peptide
  MOD_RES (6)..(7): Xaa is C or S
ASASPXXVPQDLRSVKIAKVVGRTPK

SEQ ID NO: 12044 - protein, 15 aa, Artificial Sequence
  Cyclic GFR-binding peptide
RPTQVQLEPLTVLYY

SEQ ID NO: 12045 - protein, 25 aa, Artificial Sequence
  Cyclic GFR-binding peptide
  MOD_RES (6)..(7): Xaa is C or S
ASAAPXXVPQALSNITIQIMVGRKP

SEQ ID NO: 12046 - protein, 18 aa, Artificial Sequence
  Cyclic GFR-binding peptide
  MOD_RES (4)..(5): Xaa is C or S
PKPXXAPTQLSNITVQIM

SEQ ID NO: 12047 - protein, 25 aa, Artificial Sequence
  Cyclic GFR-binding peptide
  MOD_RES (6)..(7): Xaa is C or S
YVPKPXXAPTKLRPVQVRKIDDSSN

SEQ ID NO: 12048 - protein, 22 aa, Artificial Sequence
  Cyclic GFR-binding peptide
  MOD_RES (5)..(5): Xaa is C or S
RNVQXRPTQVQLEPLTVLYYEI

SEQ ID NO: 12049 - protein, 20 aa, Artificial Sequence
  Cyclic GFR-binding peptide
VQLEPLTVLYYEIVRKKPIF

SEQ ID NO: 12050 - protein, 25 aa, Artificial Sequence
  Cyclic GFR-binding peptide
  MOD_RES (6)..(7): Xaa is C or S
KIPKAXXVPTELSNITMQIMDENEK

SEQ ID NO: 12051 - protein, 25 aa, Artificial Sequence
  Cyclic GFR-binding peptide
  MOD_RES (5)..(5): Xaa is C or S
RNVQXRPTQVQLEPLTVLYYEIVRK

SEQ ID NO: 12052 - protein, 27 aa, Artificial Sequence
  Cyclic GFR-binding peptide
  MOD_RES (6)..(7): Xaa is C or S
ASAAPXXVPQALRSVKIAKVVGRKPKV

SEQ ID NO: 12053 - protein, 24 aa, Artificial Sequence
  Cyclic GFR-binding peptide
  MOD_RES (6)..(7): Xaa is C or S
YVPKPXXAPTKLRPVQVRKIDDSS

SEQ ID NO: 12054 - protein, 17 aa, Artificial Sequence
  Cyclic GFR-binding peptide
  MOD_RES (3)..(4): Xaa is C or S
KPXXAPTKLRPVQVRKI

SEQ ID NO: 12055 - protein, 17 aa, Artificial Sequence
  Cyclic GFR-binding peptide
  MOD_RES (2)..(2): Xaa is C or S
KXQPSRVHHEPLPVVYY

SEQ ID NO: 12056 - protein, 20 aa, Artificial Sequence
  Cyclic GFR-binding peptide
  MOD_RES (6)..(7): Xaa is C or S
ASASPXXVPQDLRPVQIRKI

SEQ ID NO: 12057 - protein, 15 aa, Artificial Sequence
  Cyclic GFR-binding peptide
RSVKIAKVVGRKPKV

SEQ ID NO: 12058 - protein, 16 aa, Artificial Sequence
  Cyclic GFR-binding peptide
  MOD_RES (2)..(3): Xaa is C or S
PXXVPQALRSVKIAKV

SEQ ID NO: 12059 - protein, 17 aa, Artificial Sequence
  Cyclic GFR-binding peptide
  MOD_RES (3)..(4): Xaa is C or S
KAXXVPTELSNITMQIM

SEQ ID NO: 12060 - protein, 20 aa, Artificial Sequence
  Cyclic GFR-binding peptide
  MOD_RES (6)..(7): Xaa is C or S
ASAAPXXVPQALRPVQIRKI

SEQ ID NO: 12061 - protein, 23 aa, Artificial Sequence
  Cyclic GFR-binding peptide
  MOD_RES (6)..(7): Xaa is C or S
ASAAPXXVPQALSNITIQIMVGR

SEQ ID NO: 12062 - protein, 15 aa, Artificial Sequence
  Cyclic GFR-binding peptide
  MOD_RES (1)..(2): Xaa is C or S
XXAPTKLRSVKVAKV

SEQ ID NO: 12063 - protein, 18 aa, Artificial Sequence
  Cyclic GFR-binding peptide
TELRPVQMRKIDEYDKVV

SEQ ID NO: 12064 - protein, 19 aa, Artificial Sequence
  Cyclic GFR-binding peptide
EEEPLTMLYYRIKPHQGQH

SEQ ID NO: 12065 - protein, 22 aa, Artificial Sequence
  Cyclic GFR-binding peptide
  MOD_RES (6)..(7): Xaa is C or S
SIPKAXXVPTELRSVKMAKVDE

SEQ ID NO: 12066 - protein, 22 aa, Artificial Sequence
  Cyclic GFR-binding peptide
  MOD_RES (7)..(7): Xaa is C or S
HVTKPTXAPTKLRSVKVAKVDD

SEQ ID NO: 12067 - protein, 16 aa, Artificial Sequence
  Cyclic GFR-binding peptide
LSNITVQIMDDSSNVI

SEQ ID NO: 12068 - protein, 27 aa, Artificial Sequence
  Cyclic GFR-binding peptide
  MOD_RES (6)..(7): Xaa is C or S
ASAAPXXVPQALSNITIQIMVGRKPKV

SEQ ID NO: 12069 - protein, 27 aa, Artificial Sequence
  Cyclic GFR-binding peptide
  MOD_RES (6)..(7): Xaa is C or S
ASASPXXVSQDLRPVQIRKIIGKTPKI

SEQ ID NO: 12070 - protein, 19 aa, Artificial Sequence
  Cyclic GFR-binding peptide
PTELRPVQMRKIDEYDKVV

SEQ ID NO: 12071 - protein, 21 aa, Artificial Sequence
  Cyclic GFR-binding peptide
  MOD_RES (6)..(7): Xaa is C or S
ASASPXXVPQDLRPVQIRKIV

SEQ ID NO: 12072 - protein, 29 aa, Artificial Sequence
  Cyclic GFR-binding peptide
  MOD_RES (5)..(5): Xaa is C or S
SSVKXQPSRVHHEPLTVLYYEYVRKKPKL

SEQ ID NO: 12073 - protein, 20 aa, Artificial Sequence
  Cyclic GFR-binding peptide
  MOD_RES (7)..(7): Xaa is C or S
NDEGLEXVPTEEEPLTMLYY

SEQ ID NO: 12074 - protein, 28 aa, Artificial Sequence
  Cyclic GFR-binding peptide
  MOD_RES (7)..(7): Xaa is C or S
NDEGLEXVPTEEEPLTMLYYRIKPHQGQ

SEQ ID NO: 12075 - protein, 26 aa, Artificial Sequence
  Cyclic GFR-binding peptide
  MOD_RES (6)..(7): Xaa is C or S
ASASPXXVSQDLRSVKIAKVIGKTPK

SEQ ID NO: 12076 - protein, 14 aa, Artificial Sequence
  Cyclic GFR-binding peptide
  MOD_RES (1)..(1): Xaa is C or S
XAPTKLSNITVQIM

SEQ ID NO: 12077 - protein, 16 aa, Artificial Sequence
  Cyclic GFR-binding peptide
LRSVKVAKVDDSSNVI

SEQ ID NO: 12078 - protein, 16 aa, Artificial Sequence
  Cyclic GFR-binding peptide
  MOD_RES (1)..(1): Xaa is C or S
XRPTQVQLEPLPVVYY

SEQ ID NO: 12079 - protein, 17 aa, Artificial Sequence
  Cyclic GFR-binding peptide
KLRSVKVAKVDDSSNVI

SEQ ID NO: 12080 - protein, 17 aa, Artificial Sequence
  Cyclic GFR-binding peptide
QLRSVKVAKVDDSSNVI

SEQ ID NO: 12081 - protein, 20 aa, Artificial Sequence
  Cyclic GFR-binding peptide
  MOD_RES (6)..(7): Xaa is C or S
KIPKAXXVPTELRSVKMAKV

SEQ ID NO: 12082 - protein, 18 aa, Artificial Sequence
  Cyclic GFR-binding peptide
TELRSVKMAKVDENEKVV

SEQ ID NO: 12083 - protein, 21 aa, Artificial Sequence
  Cyclic GFR-binding peptide
RVHHEPLPVVYYEYVRKKPKL

SEQ ID NO: 12084 - protein, 19 aa, Artificial Sequence
  Cyclic GFR-binding peptide
  MOD_RES (6)..(6): Xaa is C or S
DEGLEXVPTEEEPLTMLYY

SEQ ID NO: 12085 - protein, 16 aa, Artificial Sequence
  Cyclic GFR-binding peptide
  MOD_RES (2)..(3): Xaa is C or S
PXXVPQDLRSVKIAKV

SEQ ID NO: 12086 - protein, 14 aa, Artificial Sequence
  Cyclic GFR-binding peptide
PTQVQLEPLPVVYY

SEQ ID NO: 12087 - protein, 25 aa, Artificial Sequence
  Cyclic GFR-binding peptide
  MOD_RES (6)..(7): Xaa is C or S
YVPKPXXAPTKLRSVKVAKVDDSSN

SEQ ID NO: 12088 - protein, 18 aa, Artificial Sequence
  Cyclic GFR-binding peptide
  MOD_RES (3)..(3): Xaa is C or S
VKXQPSRVHHEPLPVVYY

SEQ ID NO: 12089 - protein, 21 aa, Artificial Sequence
  Cyclic GFR-binding peptide
  MOD_RES (5)..(5): Xaa is C or S
RNVQXRPTQVQLEPLPVVYYE

SEQ ID NO: 12090 - protein, 16 aa, Artificial Sequence
  Cyclic GFR-binding peptide
  MOD_RES (1)..(1): Xaa is C or S
XQPSRVHHEPLPVVYY

SEQ ID NO: 12091 - protein, 19 aa, Artificial Sequence
  Cyclic GFR-binding peptide
  MOD_RES (5)..(6): Xaa is C or S
SASPXXVSQDLSNITIQIM

SEQ ID NO: 12092 - protein, 19 aa, Artificial Sequence
  Cyclic GFR-binding peptide
SQDLSNITIQIMIGKTPKI

SEQ ID NO: 12093 - protein, 27 aa, Artificial Sequence
  Cyclic GFR-binding peptide
  MOD_RES (6)..(7): Xaa is C or S
SIPKAXXVPTELSNITMQIMDEYDKVV

SEQ ID NO: 12094 - protein, 18 aa, Artificial Sequence
  Cyclic GFR-binding peptide
TELSNITMQIMDENEKVV

SEQ ID NO: 12095 - protein, 25 aa, Artificial Sequence
  Cyclic GFR-binding peptide
  MOD_RES (6)..(7): Xaa is C or S
ASAAPXXVPQALRPVQIRKIVGRKP

SEQ ID NO: 12096 - protein, 25 aa, Artificial Sequence
  Cyclic GFR-binding peptide
  MOD_RES (6)..(7): Xaa is C or S
YVPKPXXAPTKLSNITVQIMDDSSN

SEQ ID NO: 12097 - protein, 15 aa, Artificial Sequence
  Cyclic GFR-binding peptide
SNITIQIMVGRKPKV

SEQ ID NO: 12098 - protein, 26 aa, Artificial Sequence
  Cyclic GFR-binding peptide
  MOD_RES (5)..(5): Xaa is C or S
SSVKXQPSRVHHEPLPVVYYEYVRKK

SEQ ID NO: 12099 - protein, 18 aa, Artificial Sequence
  Cyclic GFR-binding peptide
  MOD_RES (5)..(5): Xaa is C or S
EGLEXVPTEEEPLTMLYY

SEQ ID NO: 12100 - protein, 18 aa, Artificial Sequence
  Cyclic GFR-binding peptide
  MOD_RES (4)..(5): Xaa is C or S
PKPXXAPTKLRSVKVAKV

SEQ ID NO: 12101 - protein, 15 aa, Artificial Sequence
  Cyclic GFR-binding peptide
QPSRVHHEPLTVLYY

SEQ ID NO: 12102 - protein, 22 aa, Artificial Sequence
  Cyclic GFR-binding peptide
  MOD_RES (5)..(5): Xaa is C or S
RNVQXRPTQVQLEPLPVVYYEI

SEQ ID NO: 12103 - protein, 17 aa, Artificial Sequence
  Cyclic GFR-binding peptide
ELRPVQMRKIDENEKVV

SEQ ID NO: 12104 - protein, 24 aa, Artificial Sequence
  Cyclic GFR-binding peptide
  MOD_RES (6)..(7): Xaa is C or S
SIPKAXXVPTELSNITMQIMDEYD

SEQ ID NO: 12105 - protein, 24 aa, Artificial Sequence
  Cyclic GFR-binding peptide
  MOD_RES (6)..(7): Xaa is C or S
ASASPXXVSQDLSNITIQIMIGKT

SEQ ID NO: 12106 - protein, 29 aa, Artificial Sequence
  Cyclic GFR-binding peptide
  MOD_RES (7)..(7): Xaa is C or S
NDEGLEXVPTEEEPLTMLYYRIKPHQGQH

SEQ ID NO: 12107 - protein, 23 aa, Artificial Sequence
  Cyclic GFR-binding peptide
  MOD_RES (6)..(7): Xaa is C or S
ASASPXXVPQDLSNITIQIMVGR

SEQ ID NO: 12108 - protein, 20 aa, Artificial Sequence
  Cyclic GFR-binding peptide
  MOD_RES (6)..(7): Xaa is C or S
TVPKPXXAPTQLSNITVQIM

SEQ ID NO: 12109 - protein, 24 aa, Artificial Sequence
  Cyclic GFR-binding peptide
  MOD_RES (6)..(7): Xaa is C or S
TVPKPXXAPTQLRPVQVRKIDDSS

SEQ ID NO: 12110 - protein, 19 aa, Artificial Sequence
  Cyclic GFR-binding peptide
SQDLRSVKIAKVIGKTPKI

SEQ ID NO: 12111 - protein, 26 aa, Artificial Sequence
  Cyclic GFR-binding peptide
  MOD_RES (6)..(7): Xaa is C or S
ASAAPXXVPQALRPVQIRKIVGRKPK

SEQ ID NO: 12112 - protein, 20 aa, Artificial Sequence
  Cyclic GFR-binding peptide
  MOD_RES (7)..(7): Xaa is C or S
NDEGLEXVPTEEEPLPMVYY

SEQ ID NO: 12113 - protein, 23 aa, Artificial Sequence
  Cyclic GFR-binding peptide
  MOD_RES (6)..(7): Xaa is C or S
ASASPXXVSQDLSNITIQIMIGK

SEQ ID NO: 12114 - protein, 18 aa, Artificial Sequence
  Cyclic GFR-binding peptide
  MOD_RES (5)..(5): Xaa is C or S
EGLEXVPTEEEPLPMVYY

SEQ ID NO: 12115 - protein, 14 aa, Artificial Sequence
  Cyclic GFR-binding peptide
PSRVHHEPLTVLYY

SEQ ID NO: 12116 - protein, 15 aa, Artificial Sequence
  Cyclic GFR-binding peptide
QPSRVHHEPLPVVYY

SEQ ID NO: 12117 - protein, 16 aa, Artificial Sequence
  Cyclic GFR-binding peptide
  MOD_RES (2)..(3): Xaa is C or S
PXXAPTQLRSVKVAKV

SEQ ID NO: 12118 - protein, 25 aa, Artificial Sequence
  Cyclic GFR-binding peptide
  MOD_RES (5)..(5): Xaa is C or S
RNVQXRPTQVQLEPLPVVYYEIVRK

SEQ ID NO: 12119 - protein, 23 aa, Artificial Sequence
  Cyclic GFR-binding peptide
  MOD_RES (6)..(7): Xaa is C or S
TVPKPXXAPTQLRSVKVAKVDDS

SEQ ID NO: 12120 - protein, 24 aa, Artificial Sequence
  Cyclic GFR-binding peptide
  MOD_RES (6)..(7): Xaa is C or S
ASASPXXVPQDLRPVQIRKIVGRT

SEQ ID NO: 12121 - protein, 18 aa, Artificial Sequence
  Cyclic GFR-binding peptide
  MOD_RES (3)..(3): Xaa is C or S
VKXQPSRVHHEPLTVLYY

SEQ ID NO: 12122 - protein, 20 aa, Artificial Sequence
  Cyclic GFR-binding peptide
  MOD_RES (5)..(5): Xaa is C or S
SSVKXQPSRVHHEPLPVVYY

SEQ ID NO: 12123 - protein, 27 aa, Artificial Sequence
  Cyclic GFR-binding peptide
  MOD_RES (5)..(5): Xaa is C or S
SSVKXQPSRVHHEPLTVLYYEYVRKKP

SEQ ID NO: 12124 - protein, 16 aa, Artificial Sequence
  Cyclic GFR-binding peptide
  MOD_RES (2)..(3): Xaa is C or S
PXXVPQDLRPVQIRKI

SEQ ID NO: 12125 - protein, 28 aa, Artificial Sequence
  Cyclic GFR-binding peptide
  MOD_RES (5)..(5): Xaa is C or S
RNVQXRPTQVQLEPLTVLYYEIVRKKPI

SEQ ID NO: 12126 - protein, 20 aa, Artificial Sequence
  Cyclic GFR-binding peptide
VQLEPLPVVYYEIVRKKPIF

SEQ ID NO: 12127 - protein, 21 aa, Artificial Sequence
  Cyclic GFR-binding peptide
  MOD_RES (7)..(7): Xaa is C or S
HVTKPTXAPTKLRSVKVAKVD

SEQ ID NO: 12128 - protein, 20 aa, Artificial Sequence
  Cyclic GFR-binding peptide
  MOD_RES (6)..(7): Xaa is C or S
ASASPXXVPQDLSNITIQIM

SEQ ID NO: 12129 - protein, 23 aa, Artificial Sequence
  Cyclic GFR-binding peptide
  MOD_RES (6)..(7): Xaa is C or S
SIPKAXXVPTELRPVQMRKIDEY

SEQ ID NO: 12130 - protein, 15 aa, Artificial Sequence
  Cyclic GFR-binding peptide
SNITIQIMIGKTPKI

SEQ ID NO: 12131 - protein, 19 aa, Artificial Sequence
  Cyclic GFR-binding peptide
  MOD_RES (6)..(6): Xaa is C or S
DEGLEXVPTEEEPLPMVYY

SEQ ID NO: 12132 - protein, 24 aa, Artificial Sequence
  Cyclic GFR-binding peptide
  MOD_RES (6)..(7): Xaa is C or S
ASASPXXVSQDLRSVKIAKVIGKT

SEQ ID NO: 12133 - protein, 21 aa, Artificial Sequence
  Cyclic GFR-binding peptide
  MOD_RES (7)..(7): Xaa is C or S
NDEGLEXVPTEEEPLTMLYYR

SEQ ID NO: 12134 - protein, 18 aa, Artificial Sequence
  Cyclic GFR-binding peptide
  MOD_RES (4)..(5): Xaa is C or S
AAPXXVPQALRSVKIAKV

SEQ ID NO: 12135 - protein, 13 aa, Artificial Sequence
  Cyclic GFR-binding peptide
SRVHHEPLPVVYY

SEQ ID NO: 12136 - protein, 19 aa, Artificial Sequence
  Cyclic GFR-binding peptide
PQALRPVQIRKIVGRKPKV

SEQ ID NO: 12137 - protein, 16 aa, Artificial Sequence
  Cyclic GFR-binding peptide
  MOD_RES (1)..(1): Xaa is C or S
XQPSRVHHEPLTVLYY

SEQ ID NO: 12138 - protein, 19 aa, Artificial Sequence
  Cyclic GFR-binding peptide
QLEPLPVVYYEIVRKKPIF

SEQ ID NO: 12139 - protein, 27 aa, Artificial Sequence
  Cyclic GFR-binding peptide
  MOD_RES (6)..(7): Xaa is C or S
KIPKAXXVPTELRSVKMAKVDENEKVV

SEQ ID NO: 12140 - protein, 27 aa, Artificial Sequence
  Cyclic GFR-binding peptide
  MOD_RES (6)..(7): Xaa is C or S
TVPKPXXAPTQLSNITVQIMDDSSNVI

SEQ ID NO: 12141 - protein, 16 aa, Artificial Sequence
  Cyclic GFR-binding peptide
  MOD_RES (2)..(3): Xaa is C or S
PXXVPQALRPVQIRKI

SEQ ID NO: 12142 - protein, 27 aa, Artificial Sequence
  Cyclic GFR-binding peptide
  MOD_RES (6)..(7): Xaa is C or S
ASASPXXVPQDLRSVKIAKVVGRTPKV

SEQ ID NO: 12143 - protein, 25 aa, Artificial Sequence
  Cyclic GFR-binding peptide
  MOD_RES (6)..(7): Xaa is C or S
ASASPXXVPQDLSNITIQIMVGRTP

SEQ ID NO: 12144 - protein, 17 aa, Artificial Sequence
  Cyclic GFR-binding peptide
ELSNITMQIMDEYDKVV

SEQ ID NO: 12145 - protein, 20 aa, Artificial Sequence
  Cyclic GFR-binding peptide
  MOD_RES (6)..(7): Xaa is C or S
ASASPXXVPQDLRSVKIAKV

SEQ ID NO: 12146 - protein, 19 aa, Artificial Sequence
  Cyclic GFR-binding peptide
  MOD_RES (5)..(6): Xaa is C or S
SASPXXVSQDLRPVQIRKI

SEQ ID NO: 12147 - protein, 23 aa, Artificial Sequence
  Cyclic GFR-binding peptide
  MOD_RES (5)..(5): Xaa is C or S
RNVQXRPTQVQLEPLPVVYYEIV

SEQ ID NO: 12148 - protein, 19 aa, Artificial Sequence
  Cyclic GFR-binding peptide
PTELRSVKMAKVDENEKVV

SEQ ID NO: 12149 - protein, 25 aa, Artificial Sequence
  Cyclic GFR-binding peptide
  MOD_RES (6)..(7): Xaa is C or S
TVPKPXXAPTQLSNITVQIMDDSSN

SEQ ID NO: 12150 - protein, 24 aa, Artificial Sequence
  Cyclic GFR-binding peptide
  MOD_RES (6)..(7): Xaa is C or S
SIPKAXXVPTELRPVQMRKIDEYD

SEQ ID NO: 12151 - protein, 19 aa, Artificial Sequence
  Cyclic GFR-binding peptide
PQALSNITIQIMVGRKPKV

SEQ ID NO: 12152 - protein, 23 aa, Artificial Sequence
  Cyclic GFR-binding peptide
  MOD_RES (6)..(7): Xaa is C or S
ASASPXXVSQDLRSVKIAKVIGK

SEQ ID NO: 12153 - protein, 13 aa, Artificial Sequence
  Cyclic GFR-binding peptide
APTQLRPVQVRKI

SEQ ID NO: 12154 - protein, 13 aa, Artificial Sequence
  Cyclic GFR-binding peptide
APTKLSNITVQIM

SEQ ID NO: 12155 - protein, 27 aa, Artificial Sequence
  Cyclic GFR-binding peptide
  MOD_RES (6)..(7): Xaa is C or S
KIPKAXXVPTELRPVQMRKIDENEKVV

SEQ ID NO: 12156 - protein, 15 aa, Artificial Sequence
  Cyclic GFR-binding peptide
  MOD_RES (1)..(2): Xaa is C or S
XXVPQALRPVQIRKI

SEQ ID NO: 12157 - protein, 14 aa, Artificial Sequence
  Cyclic GFR-binding peptide
  MOD_RES (1)..(1): Xaa is C or S
XVPTELRSVKMAKV

SEQ ID NO: 12158 - protein, 25 aa, Artificial Sequence
  Cyclic GFR-binding peptide
  MOD_RES (6)..(7): Xaa is C or S
TVPKPXXAPTQLRSVKVAKVDDSSN

SEQ ID NO: 12159 - protein, 14 aa, Artificial Sequence
  Cyclic GFR-binding peptide
  MOD_RES (1)..(1): Xaa is C or S
XVPQALSNITIQIM

SEQ ID NO: 12160 - protein, 17 aa, Artificial Sequence
  Cyclic GFR-binding peptide
DLRSVKIAKVIGKTPKI

SEQ ID NO: 12161 - protein, 24 aa, Artificial Sequence
  Cyclic GFR-binding peptide
  MOD_RES (6)..(7): Xaa is C or S
ASAAPXXVPQALRSVKIAKVVGRK

SEQ ID NO: 12162 - protein, 16 aa, Artificial Sequence
  Cyclic GFR-binding peptide
LSNITIQIMVGRKPKV

SEQ ID NO: 12163 - protein, 16 aa, Artificial Sequence
  Cyclic GFR-binding peptide
  MOD_RES (2)..(3): Xaa is C or S
PXXVSQDLSNITIQIM

SEQ ID NO: 12164 - protein, 18 aa, Artificial Sequence
  Cyclic GFR-binding peptide
  MOD_RES (4)..(5): Xaa is C or S
AAPXXVPQALRPVQIRKI

SEQ ID NO: 12165 - protein, 26 aa, Artificial Sequence
  Cyclic GFR-binding peptide
  MOD_RES (6)..(7): Xaa is C or S
SIPKAXXVPTELRPVQMRKIDEYDKV

SEQ ID NO: 12166 - protein, 16 aa, Artificial Sequence
  Cyclic GFR-binding peptide
  MOD_RES (2)..(3): Xaa is C or S
AXXVPTELSNITMQIM

SEQ ID NO: 12167 - protein, 21 aa, Artificial Sequence
  Cyclic GFR-binding peptide
  MOD_RES (6)..(7): Xaa is C or S
YVPKPXXAPTKLRSVKVAKVD

SEQ ID NO: 12168 - protein, 23 aa, Artificial Sequence
  Cyclic GFR-binding peptide
  MOD_RES (6)..(7): Xaa is C or S
ASASPXXVSQDLRPVQIRKIIGK

SEQ ID NO: 12169 - protein, 17 aa, Artificial Sequence
  Cyclic GFR-binding peptide
ALRPVQIRKIVGRKPKV

SEQ ID NO: 12170 - protein, 19 aa, Artificial Sequence
  Cyclic GFR-binding peptide
PTQLRSVKVAKVDDSSNVI

SEQ ID NO: 12171 - protein, 17 aa, Artificial Sequence
  Cyclic GFR-binding peptide
  MOD_RES (3)..(4): Xaa is C or S
SPXXVPQDLRSVKIAKV

SEQ ID NO: 12172 - protein, 24 aa, Artificial Sequence
  Cyclic GFR-binding peptide
  MOD_RES (6)..(7): Xaa is C or S
KIPKAXXVPTELRPVQMRKIDENE

SEQ ID NO: 12173 - protein, 17 aa, Artificial Sequence
  Cyclic GFR-binding peptide
  MOD_RES (3)..(4): Xaa is C or S
KAXXVPTELRSVKMAKV

SEQ ID NO: 12174 - protein, 16 aa, Artificial Sequence
  Cyclic GFR-binding peptide
LSNITIQIMVGRTPKV

SEQ ID NO: 12175 - protein, 19 aa, Artificial Sequence
  Cyclic GFR-binding peptide
  MOD_RES (6)..(6): Xaa is C or S
VTKPTXAPTKLRSVKVAKV

SEQ ID NO: 12176 - protein, 18 aa, Artificial Sequence
  Cyclic GFR-binding peptide
  MOD_RES (4)..(5): Xaa is C or S
AAPXXVPQALSNITIQIM

SEQ ID NO: 12177 - protein, 18 aa, Artificial Sequence
  Cyclic GFR-binding peptide
TKLRSVKVAKVDDSSNVI

SEQ ID NO: 12178 - protein, 18 aa, Artificial Sequence
  Cyclic GFR-binding peptide
TQLRSVKVAKVDDSSNVI

SEQ ID NO: 12179 - protein, 26 aa, Artificial Sequence
  Cyclic GFR-binding peptide
  MOD_RES (6)..(7): Xaa is C or S
KIPKAXXVPTELRPVQMRKIDENEKV

SEQ ID NO: 12180 - protein, 26 aa, Artificial Sequence
  Cyclic GFR-binding peptide
  MOD_RES (6)..(7): Xaa is C or S
SIPKAXXVPTELSNITMQIMDEYDKV

SEQ ID NO: 12181 - protein, 23 aa, Artificial Sequence
  Cyclic GFR-binding peptide
  MOD_RES (6)..(7): Xaa is C or S
KIPKAXXVPTELRSVKMAKVDEN

SEQ ID NO: 12182 - protein, 19 aa, Artificial Sequence
  Cyclic GFR-binding peptide
PTKLRSVKVAKVDDSSNVI

SEQ ID NO: 12183 - protein, 18 aa, Artificial Sequence
  Cyclic GFR-binding peptide
  MOD_RES (4)..(5): Xaa is C or S
ASPXXVSQDLRSVKIAKV

SEQ ID NO: 12184 - protein, 18 aa, Artificial Sequence
  Cyclic GFR-binding peptide
TQLRPVQVRKIDDSSNVI

SEQ ID NO: 12185 - protein, 18 aa, Artificial Sequence
  Cyclic GFR-binding peptide
TKLRPVQVRKIDDSSNVI

SEQ ID NO: 12186 - protein, 29 aa, Artificial Sequence
  Cyclic GFR-binding peptide
  MOD_RES (7)..(7): Xaa is C or S
NDEGLEXVPTEEEPLPMVYYRIKPHQGQH

SEQ ID NO: 12187 - protein, 19 aa, Artificial Sequence
  Cyclic GFR-binding peptide
PQDLRSVKIAKVVGRTPKV

SEQ ID NO: 12188 - protein, 14 aa, Artificial Sequence
  Cyclic GFR-binding peptide
  MOD_RES (1)..(1): Xaa is C or S
XAPTKLRSVKVAKV

SEQ ID NO: 12189 - protein, 18 aa, Artificial Sequence
  Cyclic GFR-binding peptide
  MOD_RES (4)..(5): Xaa is C or S
PKPXXAPTKLRPVQVRKI

SEQ ID NO: 12190 - protein, 27 aa, Artificial Sequence
  Cyclic GFR-binding peptide
  MOD_RES (7)..(7): Xaa is C or S
HVTKPTXAPTKLRPVQVRKIDDSSNVI

SEQ ID NO: 12191 - protein, 24 aa, Artificial Sequence
  Cyclic GFR-binding peptide
  MOD_RES (7)..(7): Xaa is C or S
HVTKPTXAPTKLRSVKVAKVDDSS

SEQ ID NO: 12192 - protein, 19 aa, Artificial Sequence
  Cyclic GFR-binding peptide
PQDLRPVQIRKIVGRTPKV

SEQ ID NO: 12193 - protein, 21 aa, Artificial Sequence
  Cyclic GFR-binding peptide
  MOD_RES (6)..(7): Xaa is C or S
ASAAPXXVPQALRSVKIAKVV

SEQ ID NO: 12194 - protein, 19 aa, Artificial Sequence
  Cyclic GFR-binding peptide
  MOD_RES (5)..(6): Xaa is C or S
IPKAXXVPTELSNITMQIM

SEQ ID NO: 12195 - protein, 27 aa, Artificial Sequence
  Cyclic GFR-binding peptide
  MOD_RES (7)..(7): Xaa is C or S
HVTKPTXAPTKLSNITVQIMDDSSNVI

SEQ ID NO: 12196 - protein, 16 aa, Artificial Sequence
  Cyclic GFR-binding peptide
LRSVKMAKVDEYDKVV

SEQ ID NO: 12197 - protein, 27 aa, Artificial Sequence
  Cyclic GFR-binding peptide
  MOD_RES (6)..(7): Xaa is C or S
SIPKAXXVPTELRPVQMRKIDEYDKVV

SEQ ID NO: 12198 - protein, 16 aa, Artificial Sequence
  Cyclic GFR-binding peptide
  MOD_RES (2)..(3): Xaa is C or S
PXXVPQALSNITIQIM

SEQ ID NO: 12199 - protein, 28 aa, Artificial Sequence
  Cyclic GFR-binding peptide
  MOD_RES (5)..(5): Xaa is C or S
SSVKXQPSRVHHEPLTVLYYEYVRKKPK

SEQ ID NO: 12200 - protein, 16 aa, Artificial Sequence
  Cyclic GFR-binding peptide
  MOD_RES (2)..(3): Xaa is C or S
PXXVPQDLSNITIQIM

SEQ ID NO: 12201 - protein, 14 aa, Artificial Sequence
  Cyclic GFR-binding peptide
PSRVHHEPLPVVYY

SEQ ID NO: 12202 - protein, 17 aa, Artificial Sequence
  Cyclic GFR-binding peptide
  MOD_RES (4)..(4): Xaa is C or S
KPTXAPTKLSNITVQIM

SEQ ID NO: 12203 - protein, 16 aa, Artificial Sequence
  Cyclic GFR-binding peptide
LRPVQMRKIDEYDKVV

SEQ ID NO: 12204 - protein, 24 aa, Artificial Sequence
  Cyclic GFR-binding peptide
  MOD_RES (7)..(7): Xaa is C or S
HVTKPTXAPTKLSNITVQIMDDSS

SEQ ID NO: 12205 - protein, 15 aa, Artificial Sequence
  Cyclic GFR-binding peptide
  MOD_RES (1)..(2): Xaa is C or S
XXVSQDLSNITIQIM

SEQ ID NO: 12206 - protein, 15 aa, Artificial Sequence
  Cyclic GFR-binding peptide
SNITIQIMVGRTPKV

SEQ ID NO: 12207 - protein, 27 aa, Artificial Sequence
  Cyclic GFR-binding peptide
  MOD_RES (7)..(7): Xaa is C or S
NDEGLEXVPTEEEPLPMVYYRIKPHQG

SEQ ID NO: 12208 - protein, 16 aa, Artificial Sequence
  Cyclic GFR-binding peptide
  MOD_RES (3)..(3): Xaa is C or S
LEXVPTEEEPLPMVYY

SEQ ID NO: 12209 - protein, 25 aa, Artificial Sequence
  Cyclic GFR-binding peptide
  MOD_RES (7)..(7): Xaa is C or S
HVTKPTXAPTKLRPVQVRKIDDSSN

SEQ ID NO: 12210 - protein, 15 aa, Artificial Sequence
  Cyclic GFR-binding peptide
SNITMQIMDENEKVV

SEQ ID NO: 12211 - protein, 25 aa, Artificial Sequence
  Cyclic GFR-binding peptide
  MOD_RES (6)..(7): Xaa is C or S
ASASPXXVSQDLSNITIQIMIGKTP

SEQ ID NO: 12212 - protein, 20 aa, Artificial Sequence
  Cyclic GFR-binding peptide
VHHEPLPVVYYEYVRKKPKL

SEQ ID NO: 12213 - protein, 25 aa, Artificial Sequence
  Cyclic GFR-binding peptide
  MOD_RES (7)..(7): Xaa is C or S
NDEGLEXVPTEEEPLTMLYYRIKPH

SEQ ID NO: 12214 - protein, 17 aa, Artificial Sequence
  Cyclic GFR-binding peptide
EPLPVVYYEIVRKKPIF

SEQ ID NO: 12215 - protein, 18 aa, Artificial Sequence
  Cyclic GFR-binding peptide
EEPLPMVYYRIKPHQGQH

SEQ ID NO: 12216 - protein, 21 aa, Artificial Sequence
  Cyclic GFR-binding peptide
  MOD_RES (5)..(5): Xaa is C or S
RNVQXRPTQVQLEPLTVLYYE

SEQ ID NO: 12217 - protein, 22 aa, Artificial Sequence
  Cyclic GFR-binding peptide
  MOD_RES (6)..(7): Xaa is C or S
ASAAPXXVPQALRSVKIAKVVG

SEQ ID NO: 12218 - protein, 26 aa, Artificial Sequence
  Cyclic GFR-binding peptide
  MOD_RES (6)..(7): Xaa is C or S
ASASPXXVSQDLRPVQIRKIIGKTPK

SEQ ID NO: 12219 - protein, 18 aa, Artificial Sequence
  Cyclic GFR-binding peptide
TELRPVQMRKIDENEKVV

SEQ ID NO: 12220 - protein, 18 aa, Artificial Sequence
  Cyclic GFR-binding peptide
  MOD_RES (5)..(5): Xaa is C or S
TKPTXAPTKLSNITVQIM

SEQ ID NO: 12221 - protein, 21 aa, Artificial Sequence
  Cyclic GFR-binding peptide
  MOD_RES (6)..(7): Xaa is C or S
YVPKPXXAPTKLRPVQVRKID

SEQ ID NO: 12222 - protein, 21 aa, Artificial Sequence
  Cyclic GFR-binding peptide
  MOD_RES (6)..(7): Xaa is C or S
ASASPXXVSQDLSNITIQIMI

SEQ ID NO: 12223 - protein, 21 aa, Artificial Sequence
  Cyclic GFR-binding peptide
  MOD_RES (5)..(5): Xaa is C or S
SSVKXQPSRVHHEPLPVVYYE

SEQ ID NO: 12224 - protein, 15 aa, Artificial Sequence
  Cyclic GFR-binding peptide
  MOD_RES (1)..(2): Xaa is C or S
XXVPQDLSNITIQIM

SEQ ID NO: 12225 - protein, 13 aa, Artificial Sequence
  Cyclic GFR-binding peptide
APTKLRPVQVRKI

SEQ ID NO: 12226 - protein, 17 aa, Artificial Sequence
  Cyclic GFR-binding peptide
DLRSVKIAKVVGRTPKV

SEQ ID NO: 12227 - protein, 13 aa, Artificial Sequence
  Cyclic GFR-binding peptide
APTQLSNITVQIM

SEQ ID NO: 12228 - protein, 18 aa, Artificial Sequence
  Cyclic GFR-binding peptide
LEPLTVLYYEIVRKKPIF

SEQ ID NO: 12229 - protein, 13 aa, Artificial Sequence
  Cyclic GFR-binding peptide
TQVQLEPLTVLYY

SEQ ID NO: 12230 - protein, 15 aa, Artificial Sequence
  Cyclic GFR-binding peptide
  MOD_RES (1)..(2): Xaa is C or S
XXVPTELRSVKMAKV

SEQ ID NO: 12231 - protein, 25 aa, Artificial Sequence
  Cyclic GFR-binding peptide
  MOD_RES (6)..(7): Xaa is C or S
ASASPXXVSQDLRSVKIAKVIGKTP

SEQ ID NO: 12232 - protein, 17 aa, Artificial Sequence
  Cyclic GFR-binding peptide
  MOD_RES (4)..(4): Xaa is C or S
KPTXAPTKLRPVQVRKI

SEQ ID NO: 12233 - protein, 16 aa, Artificial Sequence
  Cyclic GFR-binding peptide
  MOD_RES (2)..(3): Xaa is C or S
AXXVPTELRPVQMRKI

SEQ ID NO: 12234 - protein, 14 aa, Artificial Sequence
  Cyclic GFR-binding peptide
PTQVQLEPLTVLYY

SEQ ID NO: 12235 - protein, 17 aa, Artificial Sequence
  Cyclic GFR-binding peptide
ALSNITIQIMVGRKPKV

SEQ ID NO: 12236 - protein, 21 aa, Artificial Sequence
  Cyclic GFR-binding peptide
RVHHEPLTVLYYEYVRKKPKL

SEQ ID NO: 12237 - protein, 19 aa, Artificial Sequence
  Cyclic GFR-binding peptide
  MOD_RES (4)..(4): Xaa is C or S
NVQXRPTQVQLEPLPVVYY

SEQ ID NO: 12238 - protein, 13 aa, Artificial Sequence
  Cyclic GFR-binding peptide
TQVQLEPLPVVYY

SEQ ID NO: 12239 - protein, 19 aa, Artificial Sequence
  Cyclic GFR-binding peptide
SQDLRPVQIRKIIGKTPKI

SEQ ID NO: 12240 - protein, 16 aa, Artificial Sequence
  Cyclic GFR-binding peptide
LSNITIQIMIGKTPKI

SEQ ID NO: 12241 - protein, 22 aa, Artificial Sequence
  Cyclic GFR-binding peptide
  MOD_RES (6)..(7): Xaa is C or S
KIPKAXXVPTELSNITMQIMDE

SEQ ID NO: 12242 - protein, 17 aa, Artificial Sequence
  Cyclic GFR-binding peptide
  MOD_RES (3)..(4): Xaa is C or S
KPXXAPTQLSNITVQIM

SEQ ID NO: 12243 - protein, 19 aa, Artificial Sequence
  Cyclic GFR-binding peptide
  MOD_RES (5)..(6): Xaa is C or S
VPKPXXAPTKLRSVKVAKV

SEQ ID NO: 12244 - protein, 23 aa, Artificial Sequence
  Cyclic GFR-binding peptide
  MOD_RES (7)..(7): Xaa is C or S
NDEGLEXVPTEEEPLTMLYYRIK

SEQ ID NO: 12245 - protein, 20 aa, Artificial Sequence
  Cyclic GFR-binding peptide
  MOD_RES (6)..(7): Xaa is C or S
ASASPXXVSQDLRSVKIAKV

SEQ ID NO: 12246 - protein, 24 aa, Artificial Sequence
  Cyclic GFR-binding peptide
  MOD_RES (6)..(7): Xaa is C or S
ASAAPXXVPQALSNITIQIMVGRK

SEQ ID NO: 12247 - protein, 14 aa, Artificial Sequence
  Cyclic GFR-binding peptide
  MOD_RES (1)..(1): Xaa is C or S
XVPQALRPVQIRKI

SEQ ID NO: 12248 - protein, 21 aa, Artificial Sequence
  Cyclic GFR-binding peptide
  MOD_RES (6)..(7): Xaa is C or S
KIPKAXXVPTELRSVKMAKVD

SEQ ID NO: 12249 - protein, 24 aa, Artificial Sequence
  Cyclic GFR-binding peptide
  MOD_RES (6)..(7): Xaa is C or S
YVPKPXXAPTKLRSVKVAKVDDSS

SEQ ID NO: 12250 - protein, 15 aa, Artificial Sequence
  Cyclic GFR-binding peptide
SNITVQIMDDSSNVI

SEQ ID NO: 12251 - protein, 20 aa, Artificial Sequence
  Cyclic GFR-binding peptide
  MOD_RES (6)..(7): Xaa is C or S
TVPKPXXAPTQLRSVKVAKV

SEQ ID NO: 12252 - protein, 24 aa, Artificial Sequence
  Cyclic GFR-binding peptide
  MOD_RES (6)..(7): Xaa is C or S
YVPKPXXAPTKLSNITVQIMDDSS

SEQ ID NO: 12253 - protein, 21 aa, Artificial Sequence
  Cyclic GFR-binding peptide
  MOD_RES (6)..(7): Xaa is C or S
TVPKPXXAPTQLSNITVQIMD

SEQ ID NO: 12254 - protein, 18 aa, Artificial Sequence
  Cyclic GFR-binding peptide
  MOD_RES (4)..(5): Xaa is C or S
ASPXXVPQDLRSVKIAKV

SEQ ID NO: 12255 - protein, 28 aa, Artificial Sequence
  Cyclic GFR-binding peptide
  MOD_RES (5)..(5): Xaa is C or S
SSVKXQPSRVHHEPLPVVYYEYVRKKPK

SEQ ID NO: 12256 - protein, 16 aa, Artificial Sequence
  Cyclic GFR-binding peptide
  MOD_RES (3)..(3): Xaa is C or S
LEXVPTEEEPLTMLYY

SEQ ID NO: 12257 - protein, 14 aa, Artificial Sequence
  Cyclic GFR-binding peptide
  MOD_RES (1)..(1): Xaa is C or S
XAPTQLRSVKVAKV

SEQ ID NO: 12258 - protein, 15 aa, Artificial Sequence
  Cyclic GFR-binding peptide
  MOD_RES (1)..(2): Xaa is C or S
XXVPQALSNITIQIM

SEQ ID NO: 12259 - protein, 14 aa, Artificial Sequence
  Cyclic GFR-binding peptide
  MOD_RES (1)..(1): Xaa is C or S
XVPQDLRPVQIRKI

SEQ ID NO: 12260 - protein, 18 aa, Artificial Sequence
  Cyclic GFR-binding peptide
  MOD_RES (4)..(5): Xaa is C or S
PKPXXAPTKLSNITVQIM

SEQ ID NO: 12261 - protein, 15 aa, Artificial Sequence
  Cyclic GFR-binding peptide
RPTQVQLEPLPVVYY

SEQ ID NO: 12262 - protein, 18 aa, Artificial Sequence
  Cyclic GFR-binding peptide
  MOD_RES (4)..(5): Xaa is C or S
PKAXXVPTELRSVKMAKV

SEQ ID NO: 12263 - protein, 19 aa, Artificial Sequence
  Cyclic GFR-binding peptide
  MOD_RES (5)..(6): Xaa is C or S
SAAPXXVPQALRSVKIAKV

SEQ ID NO: 12264 - protein, 22 aa, Artificial Sequence
  Cyclic GFR-binding peptide
  MOD_RES (6)..(7): Xaa is C or S
KIPKAXXVPTELRSVKMAKVDE

SEQ ID NO: 12265 - protein, 16 aa, Artificial Sequence
  Cyclic GFR-binding peptide
  MOD_RES (1)..(1): Xaa is C or S
XRPTQVQLEPLTVLYY

SEQ ID NO: 12266 - protein, 14 aa, Artificial Sequence
  Cyclic GFR-binding peptide
  MOD_RES (1)..(1): Xaa is C or S
XVSQDLSNITIQIM

SEQ ID NO: 12267 - protein, 21 aa, Artificial Sequence
  Cyclic GFR-binding peptide
PTEEEPLPMVYYRIKPHQGQH

SEQ ID NO: 12268 - protein, 18 aa, Artificial Sequence
  Cyclic GFR-binding peptide
  MOD_RES (4)..(5): Xaa is C or S
PKPXXAPTQLRPVQVRKI

SEQ ID NO: 12269 - protein, 18 aa, Artificial Sequence
  Cyclic GFR-binding peptide
QDLRPVQIRKIVGRTPKV

SEQ ID NO: 12270 - protein, 23 aa, Artificial Sequence
  Cyclic GFR-binding peptide
  MOD_RES (7)..(7): Xaa is C or S
HVTKPTXAPTKLRSVKVAKVDDS

SEQ ID NO: 12271 - protein, 21 aa, Artificial Sequence
  Cyclic GFR-binding peptide
QVQLEPLTVLYYEIVRKKPIF

SEQ ID NO: 12272 - protein, 26 aa, Artificial Sequence
  Cyclic GFR-binding peptide
  MOD_RES (6)..(7): Xaa is C or S
ASASPXXVPQDLRPVQIRKIVGRTPK

SEQ ID NO: 12273 - protein, 26 aa, Artificial Sequence
  Cyclic GFR-binding peptide
  MOD_RES (5)..(5): Xaa is C or S
RNVQXRPTQVQLEPLTVLYYEIVRKK

SEQ ID NO: 12274 - protein, 17 aa, Artificial Sequence
  Cyclic GFR-binding peptide
  MOD_RES (3)..(4): Xaa is C or S
KPXXAPTKLSNITVQIM

SEQ ID NO: 12275 - protein, 21 aa, Artificial Sequence
  Cyclic GFR-binding peptide
  MOD_RES (6)..(7): Xaa is C or S
SIPKAXXVPTELSNITMQIMD

SEQ ID NO: 12276 - protein, 20 aa, Artificial Sequence
  Cyclic GFR-binding peptide
TEEEPLPMVYYRIKPHQGQH

SEQ ID NO: 12277 - protein, 25 aa, Artificial Sequence
  Cyclic GFR-binding peptide
  MOD_RES (6)..(7): Xaa is C or S
ASASPXXVPQDLRSVKIAKVVGRTP

SEQ ID NO: 12278 - protein, 21 aa, Artificial Sequence
  Cyclic GFR-binding peptide
  MOD_RES (6)..(7): Xaa is C or S
ASASPXXVPQDLSNITIQIMV

SEQ ID NO: 12279 - protein, 20 aa, Artificial Sequence
  Cyclic GFR-binding peptide
  MOD_RES (6)..(7): Xaa is C or S
SIPKAXXVPTELRSVKMAKV

SEQ ID NO: 12280 - protein, 25 aa, Artificial Sequence
  Cyclic GFR-binding peptide
  MOD_RES (6)..(7): Xaa is C or S
KIPKAXXVPTELRSVKMAKVDENEK

SEQ ID NO: 12281 - protein, 15 aa, Artificial Sequence
  Cyclic GFR-binding peptide
RPVQIRKIIGKTPKI

SEQ ID NO: 12282 - protein, 27 aa, Artificial Sequence
  Cyclic GFR-binding peptide
  MOD_RES (6)..(7): Xaa is C or S
YVPKPXXAPTKLRSVKVAKVDDSSNVI

SEQ ID NO: 12283 - protein, 19 aa, Artificial Sequence
  Cyclic GFR-binding peptide
EEEPLPMVYYRIKPHQGQH

SEQ ID NO: 12284 - protein, 17 aa, Artificial Sequence
  Cyclic GFR-binding peptide
EPLTVLYYEYVRKKPKL

SEQ ID NO: 12285 - protein, 19 aa, Artificial Sequence
  Cyclic GFR-binding peptide
  MOD_RES (4)..(4): Xaa is C or S
NVQXRPTQVQLEPLTVLYY

SEQ ID NO: 12286 - protein, 19 aa, Artificial Sequence
  Cyclic GFR-binding peptide
HHEPLTVLYYEYVRKKPKL

SEQ ID NO: 12287 - protein, 26 aa, Artificial Sequence
  Cyclic GFR-binding peptide
  MOD_RES (20)..(21): Xaa is C or S
IQQKDNFYLMSIANMKTPTXXPGASG

SEQ ID NO: 12288 - protein, 17 aa, Artificial Sequence
  Cyclic GFR-binding peptide
LLVRGNDFYLMSIANTK

SEQ ID NO: 12289 - protein, 19 aa, Artificial Sequence
  Cyclic GFR-binding peptide
IIQQKDNFYLMSIANMKTP

SEQ ID NO: 12290 - protein, 16 aa, Artificial Sequence
  Cyclic GFR-binding peptide
IIQQKDNFYLMSIANM

SEQ ID NO: 12291 - protein, 25 aa, Artificial Sequence
  Cyclic GFR-binding peptide
  MOD_RES (19)..(20): Xaa is C or S
QQKDNFYLMSIANMKTPTXXPGASG

SEQ ID NO: 12292 - protein, 15 aa, Artificial Sequence
  Cyclic GFR-binding peptide
  MOD_RES (14)..(15): Xaa is C or S
FYLMSIANTKVPAXX

SEQ ID NO: 12293 - protein, 21 aa, Artificial Sequence
  Cyclic GFR-binding peptide
  MOD_RES (15)..(16): Xaa is C or S
DFYLMSIANTKVPAXXTSPVR

SEQ ID NO: 12294 - protein, 27 aa, Artificial Sequence
  Cyclic GFR-binding peptide
  MOD_RES (21)..(22): Xaa is C or S
LLVRGNDFYLMSIANTKVPAXXTSPVR

SEQ ID NO: 12295 - protein, 24 aa, Artificial Sequence
  Cyclic GFR-binding peptide
  MOD_RES (18)..(19): Xaa is C or S
QKDNFYLMSIANMKTPTXXPGASG

SEQ ID NO: 12296 - protein, 19 aa, Artificial Sequence
  Cyclic GFR-binding peptide
LLVRGNDFYLMSIANTKVP

SEQ ID NO: 12297 - protein, 20 aa, Artificial Sequence
  Cyclic GFR-binding peptide
  MOD_RES (14)..(15): Xaa is C or S
FYLMSIANMKTPTXXPGASG

SEQ ID NO: 12298 - protein, 13 aa, Artificial Sequence
  Cyclic GFR-binding peptide
FYLMSIANMKTPT

SEQ ID NO: 12299 - protein, 20 aa, Artificial Sequence
  Cyclic GFR-binding peptide
  MOD_RES (14)..(15): Xaa is C or S
FYLMSIANTKVPAXXTSPVR

SEQ ID NO: 12300 - protein, 14 aa, Artificial Sequence
  Cyclic GFR-binding peptide
  MOD_RES (14)..(14): Xaa is C or S
FYLMSIANTKVPAX

SEQ ID NO: 12301 - protein, 19 aa, Artificial Sequence
  Cyclic GFR-binding peptide
  MOD_RES (14)..(15): Xaa is C or S
FYLMSIANTKVPAXXTSPV

SEQ ID NO: 12302 - protein, 17 aa, Artificial Sequence
  Cyclic GFR-binding peptide
IIQQKDNFYLMSIANMK

SEQ ID NO: 12303 - protein, 25 aa, Artificial Sequence
  Cyclic GFR-binding peptide
  MOD_RES (19)..(20): Xaa is C or S
VRGNDFYLMSIANTKVPAXXTSPVR

SEQ ID NO: 12304 - protein, 21 aa, Artificial Sequence
  Cyclic GFR-binding peptide
  MOD_RES (15)..(16): Xaa is C or S
NFYLMSIANMKTPTXXPGASG

SEQ ID NO: 12305 - protein, 18 aa, Artificial Sequence
  Cyclic GFR-binding peptide
IIQQKDNFYLMSIANMKT

SEQ ID NO: 12306 - protein, 15 aa, Artificial Sequence
  Cyclic GFR-binding peptide
LLVRGNDFYLMSIAN

SEQ ID NO: 12307 - protein, 23 aa, Artificial Sequence
  Cyclic GFR-binding peptide
  MOD_RES (17)..(18): Xaa is C or S
KDNFYLMSIANMKTPTXXPGASG

SEQ ID NO: 12308 - protein, 16 aa, Artificial Sequence
  Cyclic GFR-binding peptide
  MOD_RES (14)..(15): Xaa is C or S
FYLMSIANMKTPTXXP

SEQ ID NO: 12309 - protein, 22 aa, Artificial Sequence
  Cyclic GFR-binding peptide
  MOD_RES (16)..(17): Xaa is C or S
NDFYLMSIANTKVPAXXTSPVR

SEQ ID NO: 12310 - protein, 15 aa, Artificial Sequence
  Cyclic GFR-binding peptide
  MOD_RES (14)..(15): Xaa is C or S
FYLMSIANMKTPTXX

SEQ ID NO: 12311 - protein, 17 aa, Artificial Sequence
  Cyclic GFR-binding peptide
  MOD_RES (14)..(15): Xaa is C or S
FYLMSIANMKTPTXXPG

SEQ ID NO: 12312 - protein, 24 aa, Artificial Sequence
  Cyclic GFR-binding peptide
  MOD_RES (18)..(19): Xaa is C or S
RGNDFYLMSIANTKVPAXXTSPVR

SEQ ID NO: 12313 - protein, 18 aa, Artificial Sequence
  Cyclic GFR-binding peptide
  MOD_RES (14)..(15): Xaa is C or S
FYLMSIANMKTPTXXPGA

SEQ ID NO: 12314 - protein, 26 aa, Artificial Sequence
  Cyclic GFR-binding peptide
  MOD_RES (20)..(21): Xaa is C or S
LVRGNDFYLMSIANTKVPAXXTSPVR

SEQ ID NO: 12315 - protein, 18 aa, Artificial Sequence
  Cyclic GFR-binding peptide
LLVRGNDFYLMSIANTKV

SEQ ID NO: 12316 - protein, 16 aa, Artificial Sequence
  Cyclic GFR-binding peptide
LLVRGNDFYLMSIANT

SEQ ID NO: 12317 - protein, 19 aa, Artificial Sequence
  Cyclic GFR-binding peptide
  MOD_RES (14)..(15): Xaa is C or S
FYLMSIANMKTPTXXPGAS

SEQ ID NO: 12318 - protein, 23 aa, Artificial Sequence
  Cyclic GFR-binding peptide
  MOD_RES (17)..(18): Xaa is C or S
GNDFYLMSIANTKVPAXXTSPVR

SEQ ID NO: 12319 - protein, 18 aa, Artificial Sequence
  Cyclic GFR-binding peptide
  MOD_RES (14)..(15): Xaa is C or S
FYLMSIANTKVPAXXTSP

SEQ ID NO: 12320 - protein, 16 aa, Artificial Sequence
  Cyclic GFR-binding peptide
  MOD_RES (14)..(15): Xaa is C or S
FYLMSIANTKVPAXXT

SEQ ID NO: 12321 - protein, 13 aa, Artificial Sequence
  Cyclic GFR-binding peptide
FYLMSIANTKVPA

SEQ ID NO: 12322 - protein, 14 aa, Artificial Sequence
  Cyclic GFR-binding peptide
  MOD_RES (14)..(14): Xaa is C or S
FYLMSIANMKTPTX

SEQ ID NO: 12323 - protein, 15 aa, Artificial Sequence
  Cyclic GFR-binding peptide
IIQQKDNFYLMSIAN

SEQ ID NO: 12324 - protein, 27 aa, Artificial Sequence
  Cyclic GFR-binding peptide
  MOD_RES (21)..(22): Xaa is C or S
IIQQKDNFYLMSIANMKTPTXXPGASG

SEQ ID NO: 12325 - protein, 22 aa, Artificial Sequence
  Cyclic GFR-binding peptide
  MOD_RES (16)..(17): Xaa is C or S
DNFYLMSIANMKTPTXXPGASG

SEQ ID NO: 12326 - protein, 17 aa, Artificial Sequence
  Cyclic GFR-binding peptide
  MOD_RES (14)..(15): Xaa is C or S
FYLMSIANTKVPAXXTS

SEQ ID NO: 12327 - protein, 26 aa, Artificial Sequence
  Cyclic GFR-binding peptide
  MOD_RES (6)..(7): Xaa is C or S
GSAGPXXTPTKMNAISMLYFNDKQQI

SEQ ID NO: 12328 - protein, 17 aa, Artificial Sequence
  Cyclic GFR-binding peptide
KTNAISMLYFDNGRVLL

SEQ ID NO: 12329 - protein, 19 aa, Artificial Sequence
  Cyclic GFR-binding peptide
PTKMNAISMLYFNDKQQII

SEQ ID NO: 12330 - protein, 16 aa, Artificial Sequence
  Cyclic GFR-binding peptide
MNAISMLYFNDKQQII

SEQ ID NO: 12331 - protein, 25 aa, Artificial Sequence
  Cyclic GFR-binding peptide
  MOD_RES (6)..(7): Xaa is C or S
GSAGPXXTPTKMNAISMLYFNDKQQ

SEQ ID NO: 12332 - protein, 15 aa, Artificial Sequence
  Cyclic GFR-binding peptide
  MOD_RES (1)..(2): Xaa is C or S
XXAPVKTNAISMLYF

SEQ ID NO: 12333 - protein, 21 aa, Artificial Sequence
  Cyclic GFR-binding peptide
  MOD_RES (6)..(7): Xaa is C or S
RVPSTXXAPVKTNAISMLYFD

SEQ ID NO: 12334 - protein, 27 aa, Artificial Sequence
  Cyclic GFR-binding peptide
  MOD_RES (6)..(7): Xaa is C or S
RVPSTXXAPVKTNAISMLYFDNGRVLL

SEQ ID NO: 12335 - protein, 24 aa, Artificial Sequence
  Cyclic GFR-binding peptide
  MOD_RES (6)..(7): Xaa is C or S
GSAGPXXTPTKMNAISMLYFNDKQ

SEQ ID NO: 12336 - protein, 19 aa, Artificial Sequence
  Cyclic GFR-binding peptide
PVKTNAISMLYFDNGRVLL

SEQ ID NO: 12337 - protein, 20 aa, Artificial Sequence
  Cyclic GFR-binding peptide
  MOD_RES (6)..(7): Xaa is C or S
GSAGPXXTPTKMNAISMLYF

SEQ ID NO: 12338 - protein, 13 aa, Artificial Sequence
  Cyclic GFR-binding peptide
TPTKMNAISMLYF

SEQ ID NO: 12339 - protein, 20 aa, Artificial Sequence
  Cyclic GFR-binding peptide
  MOD_RES (6)..(7): Xaa is C or S
RVPSTXXAPVKTNAISMLYF

SEQ ID NO: 12340 - protein, 14 aa, Artificial Sequence
  Cyclic GFR-binding peptide
  MOD_RES (1)..(1): Xaa is C or S
XAPVKTNAISMLYF

SEQ ID NO: 12341 - protein, 19 aa, Artificial Sequence
  Cyclic GFR-binding peptide
  MOD_RES (5)..(6): Xaa is C or S
VPSTXXAPVKTNAISMLYF

SEQ ID NO: 12342 - protein, 17 aa, Artificial Sequence
  Cyclic GFR-binding peptide
KMNAISMLYFNDKQQII

SEQ ID NO: 12343 - protein, 25 aa, Artificial Sequence
  Cyclic GFR-binding peptide
  MOD_RES (6)..(7): Xaa is C or S
RVPSTXXAPVKTNAISMLYFDNGRV

SEQ ID NO: 12344 - protein, 21 aa, Artificial Sequence
  Cyclic GFR-binding peptide
  MOD_RES (6)..(7): Xaa is C or S
GSAGPXXTPTKMNAISMLYFN

SEQ ID NO: 12345 - protein, 18 aa, Artificial Sequence
  Cyclic GFR-binding peptide
TKMNAISMLYFNDKQQII

SEQ ID NO: 12346 - protein, 15 aa, Artificial Sequence
  Cyclic GFR-binding peptide
NAISMLYFDNGRVLL

SEQ ID NO: 12347 - protein, 23 aa, Artificial Sequence
  Cyclic GFR-binding peptide
  MOD_RES (6)..(7): Xaa is C or S
GSAGPXXTPTKMNAISMLYFNDK

SEQ ID NO: 12348 - protein, 16 aa, Artificial Sequence
  Cyclic GFR-binding peptide
  MOD_RES (2)..(3): Xaa is C or S
PXXTPTKMNAISMLYF

SEQ ID NO: 12349 - protein, 22 aa, Artificial Sequence
  Cyclic GFR-binding peptide
  MOD_RES (6)..(7): Xaa is C or S
RVPSTXXAPVKTNAISMLYFDN

SEQ ID NO: 12350 - protein, 15 aa, Artificial Sequence
  Cyclic GFR-binding peptide
  MOD_RES (1)..(2): Xaa is C or S
XXTPTKMNAISMLYF

SEQ ID NO: 12351 - protein, 17 aa, Artificial Sequence
  Cyclic GFR-binding peptide
  MOD_RES (3)..(4): Xaa is C or S
GPXXTPTKMNAISMLYF

SEQ ID NO: 12352 - protein, 24 aa, Artificial Sequence
  Cyclic GFR-binding peptide
  MOD_RES (6)..(7): Xaa is C or S
RVPSTXXAPVKTNAISMLYFDNGR

SEQ ID NO: 12353 - protein, 18 aa, Artificial Sequence
  Cyclic GFR-binding peptide
  MOD_RES (4)..(5): Xaa is C or S
AGPXXTPTKMNAISMLYF

SEQ ID NO: 12354 - protein, 26 aa, Artificial Sequence
  Cyclic GFR-binding peptide
  MOD_RES (6)..(7): Xaa is C or S
RVPSTXXAPVKTNAISMLYFDNGRVL

SEQ ID NO: 12355 - protein, 18 aa, Artificial Sequence
  Cyclic GFR-binding peptide
VKTNAISMLYFDNGRVLL

SEQ ID NO: 12356 - protein, 16 aa, Artificial Sequence
  Cyclic GFR-binding peptide
TNAISMLYFDNGRVLL

SEQ ID NO: 12357 - protein, 19 aa, Artificial Sequence
  Cyclic GFR-binding peptide
  MOD_RES (5)..(6): Xaa is C or S
SAGPXXTPTKMNAISMLYF

SEQ ID NO: 12358 - protein, 23 aa, Artificial Sequence
  Cyclic GFR-binding peptide
  MOD_RES (6)..(7): Xaa is C or S
RVPSTXXAPVKTNAISMLYFDNG

SEQ ID NO: 12359 - protein, 18 aa, Artificial Sequence
  Cyclic GFR-binding peptide
  MOD_RES (4)..(5): Xaa is C or S
PSTXXAPVKTNAISMLYF

SEQ ID NO: 12360 - protein, 16 aa, Artificial Sequence
  Cyclic GFR-binding peptide
  MOD_RES (2)..(3): Xaa is C or S
TXXAPVKTNAISMLYF

SEQ ID NO: 12361 - protein, 13 aa, Artificial Sequence
  Cyclic GFR-binding peptide
APVKTNAISMLYF

SEQ ID NO: 12362 - protein, 14 aa, Artificial Sequence
  Cyclic GFR-binding peptide
  MOD_RES (1)..(1): Xaa is C or S
XTPTKMNAISMLYF

SEQ ID NO: 12363 - protein, 15 aa, Artificial Sequence
  Cyclic GFR-binding peptide
NAISMLYFNDKQQII

SEQ ID NO: 12364 - protein, 27 aa, Artificial Sequence
  Cyclic GFR-binding peptide
  MOD_RES (6)..(7): Xaa is C or S
GSAGPXXTPTKMNAISMLYFNDKQQII

SEQ ID NO: 12365 - protein, 22 aa, Artificial Sequence
  Cyclic GFR-binding peptide
  MOD_RES (6)..(7): Xaa is C or S
GSAGPXXTPTKMNAISMLYFND

SEQ ID NO: 12366 - protein, 17 aa, Artificial Sequence
  Cyclic GFR-binding peptide
  MOD_RES (3)..(4): Xaa is C or S
STXXAPVKTNAISMLYF

SEQ ID NO: 12367 - protein, 16 aa, Artificial Sequence
  Cyclic GFR-binding peptide
VVNNASDYYLISTASL

SEQ ID NO: 12368 - protein, 13 aa, Artificial Sequence
  Cyclic GFR-binding peptide
YYLISTASLRTPV

SEQ ID NO: 12369 - protein, 24 aa, Artificial Sequence
  Cyclic GFR-binding peptide
  MOD_RES (18)..(19): Xaa is C or S
KNEDFYLINIPSMKEPVXXPEPIG

SEQ ID NO: 12370 - protein, 14 aa, Artificial Sequence
  Cyclic GFR-binding peptide
  MOD_RES (14)..(14): Xaa is C or S
YYLISTASMKEPVX

SEQ ID NO: 12371 - protein, 18 aa, Artificial Sequence
  Cyclic GFR-binding peptide
  MOD_RES (14)..(15): Xaa is C or S
FYLINIPSMKEPVXXPEP

SEQ ID NO: 12372 - protein, 19 aa, Artificial Sequence
  Cyclic GFR-binding peptide
  MOD_RES (14)..(15): Xaa is C or S
YYLMSTASTKVPAXXTSPV

SEQ ID NO: 12373 - protein, 21 aa, Artificial Sequence
  Cyclic GFR-binding peptide
  MOD_RES (15)..(16): Xaa is C or S
DLYLISIPEMKEPVXXPEPIG

SEQ ID NO: 12374 - protein, 16 aa, Artificial Sequence
  Cyclic GFR-binding peptide
  MOD_RES (14)..(15): Xaa is C or S
KYLISIPSMKEPVXXP

SEQ ID NO: 12375 - protein, 15 aa, Artificial Sequence
  Cyclic GFR-binding peptide
IIQQKDNKYLMSIPS

SEQ ID NO: 12376 - protein, 27 aa, Artificial Sequence
  Cyclic GFR-binding peptide
  MOD_RES (21)..(22): Xaa is C or S
IIQQKDNKYLMSIPSMKTPTXXPGASG

SEQ ID NO: 12377 - protein, 24 aa, Artificial Sequence
  Cyclic GFR-binding peptide
  MOD_RES (18)..(19): Xaa is C or S
NASDLYLISIPELRTPVXXTPPTS

SEQ ID NO: 12378 - protein, 27 aa, Artificial Sequence
  Cyclic GFR-binding peptide
  MOD_RES (21)..(22): Xaa is C or S
VVNKNEDKYLISIPSMKEPVXXPEPIG

SEQ ID NO: 12379 - protein, 24 aa, Artificial Sequence
  Cyclic GFR-binding peptide
  MOD_RES (18)..(19): Xaa is C or S
KNEDYYLISTASMKEPVXXPEPIG

SEQ ID NO: 12380 - protein, 25 aa, Artificial Sequence
  Cyclic GFR-binding peptide
  MOD_RES (19)..(20): Xaa is C or S
NKNEDYYLISTASMKEPVXXPEPIG

SEQ ID NO: 12381 - protein, 14 aa, Artificial Sequence
  Cyclic GFR-binding peptide
  MOD_RES (14)..(14): Xaa is C or S
FYLINIPSLDQPVX

SEQ ID NO: 12382 - protein, 21 aa, Artificial Sequence
  Cyclic GFR-binding peptide
  MOD_RES (15)..(16): Xaa is C or S
NYYLMSTASMKTPTXXPGASG

SEQ ID NO: 12383 - protein, 17 aa, Artificial Sequence
  Cyclic GFR-binding peptide
  MOD_RES (14)..(15): Xaa is C or S
FYLINIPSLAQPVXXPA

SEQ ID NO: 12384 - protein, 17 aa, Artificial Sequence
  Cyclic GFR-binding peptide
  MOD_RES (14)..(15): Xaa is C or S
YYLMSTASMKTPTXXPG

SEQ ID NO: 12385 - protein, 19 aa, Artificial Sequence
  Cyclic GFR-binding peptide
LLVRGNDYYLMSTASTKVP

SEQ ID NO: 12386 - protein, 22 aa, Artificial Sequence
  Cyclic GFR-binding peptide
  MOD_RES (16)..(17): Xaa is C or S
GVFYLINIPSLDQPVXXPSASA

SEQ ID NO: 12387 - protein, 17 aa, Artificial Sequence
  Cyclic GFR-binding peptide
  MOD_RES (14)..(15): Xaa is C or S
FYLINIPSLDQPVXXPS

SEQ ID NO: 12388 - protein, 15 aa, Artificial Sequence
  Cyclic GFR-binding peptide
  MOD_RES (14)..(15): Xaa is C or S
LYLMSIPEMKTPTXX

SEQ ID NO: 12389 - protein, 13 aa, Artificial Sequence
  Cyclic GFR-binding peptide
LYLMSIPEMKTPT

SEQ ID NO: 12390 - protein, 24 aa, Artificial Sequence
  Cyclic GFR-binding peptide
  MOD_RES (18)..(19): Xaa is C or S
TKGIFYLINIPSLDQSVXXPSASA

SEQ ID NO: 12391 - protein, 24 aa, Artificial Sequence
  Cyclic GFR-binding peptide
  MOD_RES (18)..(19): Xaa is C or S
RGNDYYLMSTASTKVPAXXTSPVR

SEQ ID NO: 12392 - protein, 15 aa, Artificial Sequence
  Cyclic GFR-binding peptide
VVNNASDKYLISIPS

SEQ ID NO: 12393 - protein, 15 aa, Artificial Sequence
  Cyclic GFR-binding peptide
  MOD_RES (14)..(15): Xaa is C or S
YYLMSTASTKVPAXX

SEQ ID NO: 12394 - protein, 19 aa, Artificial Sequence
  Cyclic GFR-binding peptide
  MOD_RES (14)..(15): Xaa is C or S
FYLINIPSLDQPVXXPSAS

SEQ ID NO: 12395 - protein, 20 aa, Artificial Sequence
  Cyclic GFR-binding peptide
  MOD_RES (14)..(15): Xaa is C or S
YYLISTASMKEPVXXPEPIG

SEQ ID NO: 12396 - protein, 22 aa, Artificial Sequence
  Cyclic GFR-binding peptide
  MOD_RES (16)..(17): Xaa is C or S
NDLYLMSIPETKVPAXXTSPVR

SEQ ID NO: 12397 - protein, 18 aa, Artificial Sequence
  Cyclic GFR-binding peptide
  MOD_RES (14)..(15): Xaa is C or S
LYLMSIPETKVPAXXTSP

SEQ ID NO: 12398 - protein, 20 aa, Artificial Sequence
  Cyclic GFR-binding peptide
  MOD_RES (14)..(15): Xaa is C or S
YYLISTASLRAPVXXSAPAA

SEQ ID NO: 12399 - protein, 15 aa, Artificial Sequence
  Cyclic GFR-binding peptide
VVNNASDLYLISIPE

SEQ ID NO: 12400 - protein, 19 aa, Artificial Sequence
  Cyclic GFR-binding peptide
VVNKNEDFYLINIPSMKEP

SEQ ID NO: 12401 - protein, 15 aa, Artificial Sequence
  Cyclic GFR-binding peptide
VKPTRGVFYLINIPS

SEQ ID NO: 12402 - protein, 18 aa, Artificial Sequence
  Cyclic GFR-binding peptide
VVNNASDKYLISIPSLRT

SEQ ID NO: 12403 - protein, 22 aa, Artificial Sequence
  Cyclic GFR-binding peptide
  MOD_RES (16)..(17): Xaa is C or S
DDKYLVSIPSLKTPAXXPKPVH

SEQ ID NO: 12404 - protein, 16 aa, Artificial Sequence
  Cyclic GFR-binding peptide
  MOD_RES (14)..(15): Xaa is C or S
KYLMSIPSMKTPTXXP

SEQ ID NO: 12405 - protein, 14 aa, Artificial Sequence
  Cyclic GFR-binding peptide
  MOD_RES (14)..(14): Xaa is C or S
YYLISTASLRTPVX

SEQ ID NO: 12406 - protein, 13 aa, Artificial Sequence
  Cyclic GFR-binding peptide
YYLMSTASTKVPA

SEQ ID NO: 12407 - protein, 22 aa, Artificial Sequence
  Cyclic GFR-binding peptide
  MOD_RES (16)..(17): Xaa is C or S
NDKYLMSIPSTKVPAXXTSPVR

SEQ ID NO: 12408 - protein, 14 aa, Artificial Sequence
  Cyclic GFR-binding peptide
  MOD_RES (14)..(14): Xaa is C or S
LYLMSIPEMKTPTX

SEQ ID NO: 12409 - protein, 17 aa, Artificial Sequence
  Cyclic GFR-binding peptide
YTVVGKDYYLISTASLK

SEQ ID NO: 12410 - protein, 18 aa, Artificial Sequence
  Cyclic GFR-binding peptide
  MOD_RES (14)..(15): Xaa is C or S
YYLISTASLKTPVXXAKS

SEQ ID NO: 12411 - protein, 15 aa, Artificial Sequence
  Cyclic GFR-binding peptide
LLVRGNDKYLMSIPS

SEQ ID NO: 12412 - protein, 22 aa, Artificial Sequence
  Cyclic GFR-binding peptide
  MOD_RES (16)..(17): Xaa is C or S
DDLYLVSIPELKTPAXXPKPVH

SEQ ID NO: 12413 - protein, 15 aa, Artificial Sequence
  Cyclic GFR-binding peptide
  MOD_RES (14)..(15): Xaa is C or S
YYLISTASLRTPVXX

SEQ ID NO: 12414 - protein, 17 aa, Artificial Sequence
  Cyclic GFR-binding peptide
  MOD_RES (14)..(15): Xaa is C or S
FYLISIANMKEPVXXPE

SEQ ID NO: 12415 - protein, 15 aa, Artificial Sequence
  Cyclic GFR-binding peptide
IIQQKDNLYLMSIPE

SEQ ID NO: 12416 - protein, 14 aa, Artificial Sequence
  Cyclic GFR-binding peptide
  MOD_RES (14)..(14): Xaa is C or S
YYLMSTASTKVPAX

SEQ ID NO: 12417 - protein, 16 aa, Artificial Sequence
  Cyclic GFR-binding peptide
  MOD_RES (14)..(15): Xaa is C or S
LYLMSIPETKVPAXXT

SEQ ID NO: 12418 - protein, 17 aa, Artificial Sequence
  Cyclic GFR-binding peptide
LLVRGNDLYLMSIPETK

SEQ ID NO: 12419 - protein, 15 aa, Artificial Sequence
  Cyclic GFR-binding peptide
  MOD_RES (14)..(15): Xaa is C or S
FYLINIPSLDQPVXX

SEQ ID NO: 12420 - protein, 16 aa, Artificial Sequence
  Cyclic GFR-binding peptide
VVNKNEDYYLISTASM

SEQ ID NO: 12421 - protein, 19 aa, Artificial Sequence
  Cyclic GFR-binding peptide
  MOD_RES (14)..(15): Xaa is C or S
KYLISIPSMKEPVXXPEPI

SEQ ID NO: 12422 - protein, 19 aa, Artificial Sequence
  Cyclic GFR-binding peptide
  MOD_RES (14)..(15): Xaa is C or S
YYLISTASLRTPVXXTPPT

SEQ ID NO: 12423 - protein, 21 aa, Artificial Sequence
  Cyclic GFR-binding peptide
  MOD_RES (15)..(16): Xaa is C or S
DYYLVSTASLKTPAXXPKPVH

SEQ ID NO: 12424 - protein, 20 aa, Artificial Sequence
  Cyclic GFR-binding peptide
  MOD_RES (14)..(15): Xaa is C or S
YYLMSTASTKVPAXXTSPVR

SEQ ID NO: 12425 - protein, 18 aa, Artificial Sequence
  Cyclic GFR-binding peptide
  MOD_RES (14)..(15): Xaa is C or S
LYLISIPEMKEPVXXPEP

SEQ ID NO: 12426 - protein, 18 aa, Artificial Sequence
  Cyclic GFR-binding peptide
LLVRGNDKYLMSIPSTKV

SEQ ID NO: 12427 - protein, 16 aa, Artificial Sequence
  Cyclic GFR-binding peptide
  MOD_RES (14)..(15): Xaa is C or S
YYLMSTASMKTPTXXP

SEQ ID NO: 12428 - protein, 25 aa, Artificial Sequence
  Cyclic GFR-binding peptide
  MOD_RES (19)..(20): Xaa is C or S
NKNEDFYLINIPSMKEPVXXPEPIG

SEQ ID NO: 12429 - protein, 16 aa, Artificial Sequence
  Cyclic GFR-binding peptide
  MOD_RES (14)..(15): Xaa is C or S
LYLISIPELRTPVXXT

SEQ ID NO: 12430 - protein, 13 aa, Artificial Sequence
  Cyclic GFR-binding peptide
FYLINIPSLDQPV

SEQ ID NO: 12431 - protein, 21 aa, Artificial Sequence
  Cyclic GFR-binding peptide
  MOD_RES (15)..(16): Xaa is C or S
DKYLVSIPSLKTPAXXPKPVH

SEQ ID NO: 12432 - protein, 21 aa, Artificial Sequence
  Cyclic GFR-binding peptide
  MOD_RES (15)..(16): Xaa is C or S
VFYLINIPSLAQPVXXPAASA

SEQ ID NO: 12433 - protein, 15 aa, Artificial Sequence
  Cyclic GFR-binding peptide
VVNKNEDLYLISIPE

SEQ ID NO: 12434 - protein, 14 aa, Artificial Sequence
  Cyclic GFR-binding peptide
  MOD_RES (14)..(14): Xaa is C or S
KYLISIPSLRTPVX

SEQ ID NO: 12435 - protein, 15 aa, Artificial Sequence
  Cyclic GFR-binding peptide
  MOD_RES (14)..(15): Xaa is C or S
LYLISIPEMKEPVXX

SEQ ID NO: 12436 - protein, 16 aa, Artificial Sequence
  Cyclic GFR-binding peptide
  MOD_RES (14)..(15): Xaa is C or S
YYLISTASLRTPVXXT

SEQ ID NO: 12437 - protein, 25 aa, Artificial Sequence
  Cyclic GFR-binding peptide
  MOD_RES (19)..(20): Xaa is C or S
NNASDLYLISIPELRTPVXXTPPTS

SEQ ID NO: 12438 - protein, 18 aa, Artificial Sequence
  Cyclic GFR-binding peptide
IIQQKDNKYLMSIPSMKT

SEQ ID NO: 12439 - protein, 27 aa, Artificial Sequence
  Cyclic GFR-binding peptide
  MOD_RES (21)..(22): Xaa is C or S
YTVVGKDYYLISTASLKTPVXXAKSAK

SEQ ID NO: 12440 - protein, 19 aa, Artificial Sequence
  Cyclic GFR-binding peptide
VVNNAADYYLISTASLRAP

SEQ ID NO: 12441 - protein, 24 aa, Artificial Sequence
  Cyclic GFR-binding peptide
  MOD_RES (18)..(19): Xaa is C or S
KNEDFYLISIANMKEPVXXPEPIG

SEQ ID NO: 12442 - protein, 13 aa, Artificial Sequence
  Cyclic GFR-binding peptide
YYLMSTASMKTPT

SEQ ID NO: 12443 - protein, 20 aa, Artificial Sequence
  Cyclic GFR-binding peptide
  MOD_RES (14)..(15): Xaa is C or S
LYLISIPELRTPVXXTPPTS

SEQ ID NO: 12444 - protein, 17 aa, Artificial Sequence
  Cyclic GFR-binding peptide
  MOD_RES (14)..(15): Xaa is C or S
LYLMSIPEMKTPTXXPG

SEQ ID NO: 12445 - protein, 18 aa, Artificial Sequence
  Cyclic GFR-binding peptide
  MOD_RES (14)..(15): Xaa is C or S
YYLMSTASMKTPTXXPGA

SEQ ID NO: 12446 - protein, 19 aa, Artificial Sequence
  Cyclic GFR-binding peptide
  MOD_RES (14)..(15): Xaa is C or S
KYLMSIPSTKVPAXXTSPV

SEQ ID NO: 12447 - protein, 26 aa, Artificial Sequence
  Cyclic GFR-binding peptide
  MOD_RES (20)..(21): Xaa is C or S
IQQKDNKYLMSIPSMKTPTXXPGASG

SEQ ID NO: 12448 - protein, 23 aa, Artificial Sequence
  Cyclic GFR-binding peptide
  MOD_RES (17)..(18): Xaa is C or S
NEDLYLISIPEMKEPVXXPEPIG

SEQ ID NO: 12449 - protein, 16 aa, Artificial Sequence
  Cyclic GFR-binding peptide
  MOD_RES (14)..(15): Xaa is C or S
YYLISTASLRAPVXXS

SEQ ID NO: 12450 - protein, 20 aa, Artificial Sequence
  Cyclic GFR-binding peptide
  MOD_RES (14)..(15): Xaa is C or S
LYLVSIPELKTPAXXPKPVH

SEQ ID NO: 12451 - protein, 27 aa, Artificial Sequence
  Cyclic GFR-binding peptide
  MOD_RES (21)..(22): Xaa is C or S
VVNKNEDFYLISIANMKEPVXXPEPIG

SEQ ID NO: 12452 - protein, 22 aa, Artificial Sequence
  Cyclic GFR-binding peptide
  MOD_RES (16)..(17): Xaa is C or S
DNYYLMSTASMKTPTXXPGASG

SEQ ID NO: 12453 - protein, 27 aa, Artificial Sequence
  Cyclic GFR-binding peptide
  MOD_RES (21)..(22): Xaa is C or S
VVNNAADYYLISTASLRAPVXXSAPAA

SEQ ID NO: 12454 - protein, 13 aa, Artificial Sequence
  Cyclic GFR-binding peptide
FYLINIPSMKEPV

SEQ ID NO: 12455 - protein, 26 aa, Artificial Sequence
  Cyclic GFR-binding peptide
  MOD_RES (20)..(21): Xaa is C or S
TVVGKDYYLISTASLKTPVXXAKSAK

SEQ ID NO: 12456 - protein, 15 aa, Artificial Sequence
  Cyclic GFR-binding peptide
LLVRGNDLYLMSIPE

SEQ ID NO: 12457 - protein, 24 aa, Artificial Sequence
  Cyclic GFR-binding peptide
  MOD_RES (18)..(19): Xaa is C or S
KRGVFYLINIPSLAQPVXXPAASA

SEQ ID NO: 12458 - protein, 14 aa, Artificial Sequence
  Cyclic GFR-binding peptide
  MOD_RES (14)..(14): Xaa is C or S
LYLISIPEMKEPVX

SEQ ID NO: 12459 - protein, 21 aa, Artificial Sequence
  Cyclic GFR-binding peptide
  MOD_RES (15)..(16): Xaa is C or S
NKYLMSIPSMKTPTXXPGASG

SEQ ID NO: 12460 - protein, 17 aa, Artificial Sequence
  Cyclic GFR-binding peptide
VKPTRGVFYLINIPSLD

SEQ ID NO: 12461 - protein, 19 aa, Artificial Sequence
  Cyclic GFR-binding peptide
IIQQKDNYYLMSTASMKTP

SEQ ID NO: 12462 - protein, 25 aa, Artificial Sequence
  Cyclic GFR-binding peptide
  MOD_RES (19)..(20): Xaa is C or S
PTRGVFYLINIPSLDQPVXXPSASA

SEQ ID NO: 12463 - protein, 18 aa, Artificial Sequence
  Cyclic GFR-binding peptide
VVNKNEDYYLISTASMKE

SEQ ID NO: 12464 - protein, 27 aa, Artificial Sequence
  Cyclic GFR-binding peptide
  MOD_RES (21)..(22): Xaa is C or S
VVNKNEDFYLINIPSMKEPVXXPEPIG

SEQ ID NO: 12465 - protein, 25 aa, Artificial Sequence
  Cyclic GFR-binding peptide
  MOD_RES (19)..(20): Xaa is C or S
VVGKDYYLISTASLKTPVXXAKSAK

SEQ ID NO: 12466 - protein, 15 aa, Artificial Sequence
  Cyclic GFR-binding peptide
  MOD_RES (14)..(15): Xaa is C or S
YYLISTASMKEPVXX

SEQ ID NO: 12467 - protein, 19 aa, Artificial Sequence
  Cyclic GFR-binding peptide
VKPTRGVFYLINIPSLDQP

SEQ ID NO: 12468 - protein, 23 aa, Artificial Sequence
  Cyclic GFR-binding peptide
  MOD_RES (17)..(18): Xaa is C or S
NEDFYLISIANMKEPVXXPEPIG

SEQ ID NO: 12469 - protein, 19 aa, Artificial Sequence
  Cyclic GFR-binding peptide
  MOD_RES (14)..(15): Xaa is C or S
LYLISIPELRTPVXXTPPT

SEQ ID NO: 12470 - protein, 18 aa, Artificial Sequence
  Cyclic GFR-binding peptide
  MOD_RES (14)..(15): Xaa is C or S
KYLMSIPSMKTPTXXPGA

SEQ ID NO: 12471 - protein, 14 aa, Artificial Sequence
  Cyclic GFR-binding peptide
  MOD_RES (14)..(14): Xaa is C or S
LYLMSIPETKVPAX

SEQ ID NO: 12472 - protein, 18 aa, Artificial Sequence
  Cyclic GFR-binding peptide
  MOD_RES (14)..(15): Xaa is C or S
LYLISIPELRTPVXXTPP

SEQ ID NO: 12473 - protein, 21 aa, Artificial Sequence
  Cyclic GFR-binding peptide
  MOD_RES (15)..(16): Xaa is C or S
DFYLINIPSMKEPVXXPEPIG

SEQ ID NO: 12474 - protein, 15 aa, Artificial Sequence
  Cyclic GFR-binding peptide
  MOD_RES (14)..(15): Xaa is C or S
LYLMSIPETKVPAXX

SEQ ID NO: 12475 - protein, 16 aa, Artificial Sequence
  Cyclic GFR-binding peptide
  MOD_RES (14)..(15): Xaa is C or S
YYLISTASMKEPVXXP

SEQ ID NO: 12476 - protein, 19 aa, Artificial Sequence
  Cyclic GFR-binding peptide
VVNNASDYYLISTASLRTP

SEQ ID NO: 12477 - protein, 27 aa, Artificial Sequence
  Cyclic GFR-binding peptide
  MOD_RES (21)..(22): Xaa is C or S
VVNNASDYYLISTASLRTPVXXTPPTS

SEQ ID NO: 12478 - protein, 15 aa, Artificial Sequence
  Cyclic GFR-binding peptide
YTVVGKDYYLISTAS

SEQ ID NO: 12479 - protein, 26 aa, Artificial Sequence
  Cyclic GFR-binding peptide
  MOD_RES (20)..(21): Xaa is C or S
VNNASDKYLISIPSLRTPVXXTPPTS

SEQ ID NO: 12480 - protein, 17 aa, Artificial Sequence
  Cyclic GFR-binding peptide
VVNKNEDLYLISIPEMK

SEQ ID NO: 12481 - protein, 21 aa, Artificial Sequence
  Cyclic GFR-binding peptide
  MOD_RES (15)..(16): Xaa is C or S
DYYLISTASMKEPVXXPEPIG

SEQ ID NO: 12482 - protein, 13 aa, Artificial Sequence
  Cyclic GFR-binding peptide
LYLISIPELRTPV

SEQ ID NO: 12483 - protein, 23 aa, Artificial Sequence
  Cyclic GFR-binding peptide
  MOD_RES (17)..(18): Xaa is C or S
NEDFYLINIPSMKEPVXXPEPIG

SEQ ID NO: 12484 - protein, 16 aa, Artificial Sequence
  Cyclic GFR-binding peptide
VVNNAADYYLISTASL

SEQ ID NO: 12485 - protein, 26 aa, Artificial Sequence
  Cyclic GFR-binding peptide
  MOD_RES (20)..(21): Xaa is C or S
LVRGNDKYLMSIPSTKVPAXXTSPVR

SEQ ID NO: 12486 - protein, 18 aa, Artificial Sequence
  Cyclic GFR-binding peptide
  MOD_RES (14)..(15): Xaa is C or S
YYLISTASMKEPVXXPEP

SEQ ID NO: 12487 - protein, 17 aa, Artificial Sequence
  Cyclic GFR-binding peptide
  MOD_RES (14)..(15): Xaa is C or S
LYLMSIPETKVPAXXTS

SEQ ID NO: 12488 - protein, 21 aa, Artificial Sequence
  Cyclic GFR-binding peptide
  MOD_RES (15)..(16): Xaa is C or S
DKYLISIPSLRTPVXXTPPTS

SEQ ID NO: 12489 - protein, 15 aa, Artificial Sequence
  Cyclic GFR-binding peptide
  MOD_RES (14)..(15): Xaa is C or S
KYLMSIPSTKVPAXX

SEQ ID NO: 12490 - protein, 22 aa, Artificial Sequence
  Cyclic GFR-binding peptide
  MOD_RES (16)..(17): Xaa is C or S
DDYYLVSTASLKTPAXXPKPVH

SEQ ID NO: 12491 - protein, 14 aa, Artificial Sequence
  Cyclic GFR-binding peptide
  MOD_RES (14)..(14): Xaa is C or S
LYLISIPELRTPVX

SEQ ID NO: 12492 - protein, 15 aa, Artificial Sequence
  Cyclic GFR-binding peptide
  MOD_RES (14)..(15): Xaa is C or S
FYLISIANMKEPVXX

SEQ ID NO: 12493 - protein, 14 aa, Artificial Sequence
  Cyclic GFR-binding peptide
  MOD_RES (14)..(14): Xaa is C or S
KYLMSIPSTKVPAX

SEQ ID NO: 12494 - protein, 20 aa, Artificial Sequence
  Cyclic GFR-binding peptide
  MOD_RES (14)..(15): Xaa is C or S
FYLINIPSLDQSVXXPSASA

SEQ ID NO: 12495 - protein, 26 aa, Artificial Sequence
  Cyclic GFR-binding peptide
  MOD_RES (20)..(21): Xaa is C or S
VNKNEDFYLISIANMKEPVXXPEPIG

SEQ ID NO: 12496 - protein, 16 aa, Artificial Sequence
  Cyclic GFR-binding peptide
  MOD_RES (14)..(15): Xaa is C or S
FYLINIPSLDQPVXXP

SEQ ID NO: 12497 - protein, 19 aa, Artificial Sequence
  Cyclic GFR-binding peptide
  MOD_RES (14)..(15): Xaa is C or S
YYLISTASLRAPVXXSAPA

SEQ ID NO: 12498 - protein, 18 aa, Artificial Sequence
  Cyclic GFR-binding peptide
  MOD_RES (14)..(15): Xaa is C or S
LYLMSIPEMKTPTXXPGA

SEQ ID NO: 12499 - protein, 13 aa, Artificial Sequence
  Cyclic GFR-binding peptide
KYLISIPSMKEPV

SEQ ID NO: 12500 - protein, 16 aa, Artificial Sequence
  Cyclic GFR-binding peptide
IIQQKDNYYLMSTASM

SEQ ID NO: 12501 - protein, 15 aa, Artificial Sequence
  Cyclic GFR-binding peptide
  MOD_RES (14)..(15): Xaa is C or S
KYLISIPSMKEPVXX

SEQ ID NO: 12502 - protein, 15 aa, Artificial Sequence
  Cyclic GFR-binding peptide
VVNKNEDFYLISIAN

SEQ ID NO: 12503 - protein, 19 aa, Artificial Sequence
  Cyclic GFR-binding peptide
VVNKNEDLYLISIPEMKEP

SEQ ID NO: 12504 - protein, 23 aa, Artificial Sequence
  Cyclic GFR-binding peptide
  MOD_RES (17)..(18): Xaa is C or S
KDNLYLMSIPEMKTPTXXPGASG

SEQ ID NO: 12505 - protein, 20 aa, Artificial Sequence
  Cyclic GFR-binding peptide
  MOD_RES (14)..(15): Xaa is C or S
FYLINIPSMKEPVXXPEPIG

SEQ ID NO: 12506 - protein, 19 aa, Artificial Sequence
  Cyclic GFR-binding peptide
  MOD_RES (14)..(15): Xaa is C or S
LYLMSIPETKVPAXXTSPV

SEQ ID NO: 12507 - protein, 20 aa, Artificial Sequence
  Cyclic GFR-binding peptide
  MOD_RES (14)..(15): Xaa is C or S
KYLMSIPSTKVPAXXTSPVR

SEQ ID NO: 12508 - protein, 24 aa, Artificial Sequence
  Cyclic GFR-binding peptide
  MOD_RES (18)..(19): Xaa is C or S
KNEDLYLISIPEMKEPVXXPEPIG

SEQ ID NO: 12509 - protein, 26 aa, Artificial Sequence
  Cyclic GFR-binding peptide
  MOD_RES (20)..(21): Xaa is C or S
VNKNEDKYLISIPSMKEPVXXPEPIG

SEQ ID NO: 12510 - protein, 14 aa, Artificial Sequence
  Cyclic GFR-binding peptide
  MOD_RES (14)..(14): Xaa is C or S
KYLISIPSMKEPVX

SEQ ID NO: 12511 - protein, 25 aa, Artificial Sequence
  Cyclic GFR-binding peptide
  MOD_RES (19)..(20): Xaa is C or S
NSSDDLYLVSIPELKTPAXXPKPVH

SEQ ID NO: 12512 - protein, 18 aa, Artificial Sequence
  Cyclic GFR-binding peptide
VVNKNEDLYLISIPEMKE

SEQ ID NO: 12513 - protein, 18 aa, Artificial Sequence
  Cyclic GFR-binding peptide
  MOD_RES (14)..(15): Xaa is C or S
FYLISIANMKEPVXXPEP

SEQ ID NO: 12514 - protein, 15 aa, Artificial Sequence
  Cyclic GFR-binding peptide
  MOD_RES (14)..(15): Xaa is C or S
KYLISIPSLRTPVXX

SEQ ID NO: 12515 - protein, 22 aa, Artificial Sequence
  Cyclic GFR-binding peptide
  MOD_RES (16)..(17): Xaa is C or S
NDYYLMSTASTKVPAXXTSPVR

SEQ ID NO: 12516 - protein, 21 aa, Artificial Sequence
  Cyclic GFR-binding peptide
  MOD_RES (15)..(16): Xaa is C or S
DYYLISTASLKTPVXXAKSAK

SEQ ID NO: 12517 - protein, 25 aa, Artificial Sequence
  Cyclic GFR-binding peptide
  MOD_RES (19)..(20): Xaa is C or S
QQKDNLYLMSIPEMKTPTXXPGASG

SEQ ID NO: 12518 - protein, 20 aa, Artificial Sequence
  Cyclic GFR-binding peptide
  MOD_RES (14)..(15): Xaa is C or S
YYLMSTASMKTPTXXPGASG

SEQ ID NO: 12519 - protein, 26 aa, Artificial Sequence
  Cyclic GFR-binding peptide
  MOD_RES (20)..(21): Xaa is C or S
VNKNEDLYLISIPEMKEPVXXPEPIG

SEQ ID NO: 12520 - protein, 16 aa, Artificial Sequence
  Cyclic GFR-binding peptide
  MOD_RES (14)..(15): Xaa is C or S
FYLINIPSMKEPVXXP

SEQ ID NO: 12521 - protein, 27 aa, Artificial Sequence
  Cyclic GFR-binding peptide
  MOD_RES (21)..(22): Xaa is C or S
IKPTKGIFYLINIPSLDQSVXXPSASA

SEQ ID NO: 12522 - protein, 15 aa, Artificial Sequence
  Cyclic GFR-binding peptide
VVNKNEDFYLINIPS

SEQ ID NO: 12523 - protein, 23 aa, Artificial Sequence
  Cyclic GFR-binding peptide
  MOD_RES (17)..(18): Xaa is C or S
GNDLYLMSIPETKVPAXXTSPVR

SEQ ID NO: 12524 - protein, 26 aa, Artificial Sequence
  Cyclic GFR-binding peptide
  MOD_RES (20)..(21): Xaa is C or S
VNSSDDYYLVSTASLKTPAXXPKPVH

SEQ ID NO: 12525 - protein, 25 aa, Artificial Sequence
  Cyclic GFR-binding peptide
  MOD_RES (19)..(20): Xaa is C or S
NNAADYYLISTASLRAPVXXSAPAA

SEQ ID NO: 12526 - protein, 25 aa, Artificial Sequence
  Cyclic GFR-binding peptide
  MOD_RES (19)..(20): Xaa is C or S
QQKDNKYLMSIPSMKTPTXXPGASG

SEQ ID NO: 12527 - protein, 13 aa, Artificial Sequence
  Cyclic GFR-binding peptide
KYLMSIPSTKVPA

SEQ ID NO: 12528 - protein, 20 aa, Artificial Sequence
  Cyclic GFR-binding peptide
  MOD_RES (14)..(15): Xaa is C or S
FYLINIPSLAQPVXXPAASA

SEQ ID NO: 12529 - protein, 22 aa, Artificial Sequence
  Cyclic GFR-binding peptide
  MOD_RES (16)..(17): Xaa is C or S
ADYYLISTASLRAPVXXSAPAA

SEQ ID NO: 12530 - protein, 19 aa, Artificial Sequence
  Cyclic GFR-binding peptide
  MOD_RES (14)..(15): Xaa is C or S
KYLMSIPSMKTPTXXPGAS

SEQ ID NO: 12531 - protein, 16 aa, Artificial Sequence
  Cyclic GFR-binding peptide
  MOD_RES (14)..(15): Xaa is C or S
LYLISIPEMKEPVXXP

SEQ ID NO: 12532 - protein, 26 aa, Artificial Sequence
  Cyclic GFR-binding peptide
  MOD_RES (20)..(21): Xaa is C or S
IQQKDNYYLMSTASMKTPTXXPGASG

SEQ ID NO: 12533 - protein, 19 aa, Artificial Sequence
  Cyclic GFR-binding peptide
  MOD_RES (14)..(15): Xaa is C or S
FYLINIPSMKEPVXXPEPI

SEQ ID NO: 12534 - protein, 24 aa, Artificial Sequence
  Cyclic GFR-binding peptide
  MOD_RES (18)..(19): Xaa is C or S
NASDYYLISTASLRTPVXXTPPTS

SEQ ID NO: 12535 - protein, 20 aa, Artificial Sequence
  Cyclic GFR-binding peptide
  MOD_RES (14)..(15): Xaa is C or S
LYLMSIPEMKTPTXXPGASG

SEQ ID NO: 12536 - protein, 25 aa, Artificial Sequence
  Cyclic GFR-binding peptide
  MOD_RES (19)..(20): Xaa is C or S
VRGNDYYLMSTASTKVPAXXTSPVR

SEQ ID NO: 12537 - protein, 18 aa, Artificial Sequence
  Cyclic GFR-binding peptide
LLVRGNDLYLMSIPETKV

SEQ ID NO: 12538 - protein, 18 aa, Artificial Sequence
  Cyclic GFR-binding peptide
  MOD_RES (14)..(15): Xaa is C or S
FYLINIPSLDQPVXXPSA

SEQ ID NO: 12539 - protein, 26 aa, Artificial Sequence
  Cyclic GFR-binding peptide
  MOD_RES (20)..(21): Xaa is C or S
KPTKGIFYLINIPSLDQSVXXPSASA

SEQ ID NO: 12540 - protein, 18 aa, Artificial Sequence
  Cyclic GFR-binding peptide
  MOD_RES (14)..(15): Xaa is C or S
YYLMSTASTKVPAXXTSP

SEQ ID NO: 12541 - protein, 13 aa, Artificial Sequence
  Cyclic GFR-binding peptide
LYLISIPEMKEPV

SEQ ID NO: 12542 - protein, 18 aa, Artificial Sequence
  Cyclic GFR-binding peptide
VVNNAADYYLISTASLRA

SEQ ID NO: 12543 - protein, 25 aa, Artificial Sequence
  Cyclic GFR-binding peptide
  MOD_RES (19)..(20): Xaa is C or S
VRGNDKYLMSIPSTKVPAXXTSPVR

SEQ ID NO: 12544 - protein, 20 aa, Artificial Sequence
  Cyclic GFR-binding peptide
  MOD_RES (14)..(15): Xaa is C or S
YYLVSTASLKTPAXXPKPVH

SEQ ID NO: 12545 - protein, 16 aa, Artificial Sequence
  Cyclic GFR-binding peptide
YTVVGKDYYLISTASL

SEQ ID NO: 12546 - protein, 24 aa, Artificial Sequence
  Cyclic GFR-binding peptide
  MOD_RES (18)..(19): Xaa is C or S
RGNDKYLMSIPSTKVPAXXTSPVR

SEQ ID NO: 12547 - protein, 16 aa, Artificial Sequence
  Cyclic GFR-binding peptide
  MOD_RES (14)..(15): Xaa is C or S
YYLISTASLKTPVXXA

SEQ ID NO: 12548 - protein, 19 aa, Artificial Sequence
  Cyclic GFR-binding peptide
  MOD_RES (14)..(15): Xaa is C or S
YYLMSTASMKTPTXXPGAS

SEQ ID NO: 12549 - protein, 26 aa, Artificial Sequence
  Cyclic GFR-binding peptide
  MOD_RES (20)..(21): Xaa is C or S
KPTRGVFYLINIPSLDQPVXXPSASA

SEQ ID NO: 12550 - protein, 17 aa, Artificial Sequence
  Cyclic GFR-binding peptide
VVNNAADYYLISTASLR

SEQ ID NO: 12551 - protein, 19 aa, Artificial Sequence
  Cyclic GFR-binding peptide
IIQQKDNKYLMSIPSMKTP

SEQ ID NO: 12552 - protein, 15 aa, Artificial Sequence
  Cyclic GFR-binding peptide
  MOD_RES (14)..(15): Xaa is C or S
FYLINIPSLDQSVXX

SEQ ID NO: 12553 - protein, 24 aa, Artificial Sequence
  Cyclic GFR-binding peptide
  MOD_RES (18)..(19): Xaa is C or S
RGNDLYLMSIPETKVPAXXTSPVR

SEQ ID NO: 12554 - protein, 19 aa, Artificial Sequence
  Cyclic GFR-binding peptide
VVNNASDKYLISIPSLRTP

SEQ ID NO: 12555 - protein, 16 aa, Artificial Sequence
  Cyclic GFR-binding peptide
  MOD_RES (14)..(15): Xaa is C or S
FYLINIPSLAQPVXXP

SEQ ID NO: 12556 - protein, 25 aa, Artificial Sequence
  Cyclic GFR-binding peptide
  MOD_RES (19)..(20): Xaa is C or S
QQKDNYYLMSTASMKTPTXXPGASG

SEQ ID NO: 12557 - protein, 18 aa, Artificial Sequence
  Cyclic GFR-binding peptide
YTVVGKDYYLISTASLKT

SEQ ID NO: 12558 - protein, 18 aa, Artificial Sequence
  Cyclic GFR-binding peptide
  MOD_RES (14)..(15): Xaa is C or S
KYLMSIPSTKVPAXXTSP

SEQ ID NO: 12559 - protein, 19 aa, Artificial Sequence
  Cyclic GFR-binding peptide
VVNKNEDFYLISIANMKEP

SEQ ID NO: 12560 - protein, 20 aa, Artificial Sequence
  Cyclic GFR-binding peptide
  MOD_RES (14)..(15): Xaa is C or S
LYLMSIPETKVPAXXTSPVR

SEQ ID NO: 12561 - protein, 22 aa, Artificial Sequence
  Cyclic GFR-binding peptide
  MOD_RES (16)..(17): Xaa is C or S
SDYYLISTASLRTPVXXTPPTS

SEQ ID NO: 12562 - protein, 16 aa, Artificial Sequence
  Cyclic GFR-binding peptide
IKPTKGIFYLINIPSL

SEQ ID NO: 12563 - protein, 16 aa, Artificial Sequence
  Cyclic GFR-binding peptide
  MOD_RES (14)..(15): Xaa is C or S
YYLMSTASTKVPAXXT

SEQ ID NO: 12564 - protein, 25 aa, Artificial Sequence
  Cyclic GFR-binding peptide
  MOD_RES (19)..(20): Xaa is C or S
NNASDKYLISIPSLRTPVXXTPPTS

SEQ ID NO: 12565 - protein, 15 aa, Artificial Sequence
  Cyclic GFR-binding peptide
VVNNASDYYLISTAS

SEQ ID NO: 12566 - protein, 16 aa, Artificial Sequence
  Cyclic GFR-binding peptide
IIQQKDNKYLMSIPSM

SEQ ID NO: 12567 - protein, 21 aa, Artificial Sequence
  Cyclic GFR-binding peptide
  MOD_RES (15)..(16): Xaa is C or S
DYYLISTASLRAPVXXSAPAA

SEQ ID NO: 12568 - protein, 17 aa, Artificial Sequence
  Cyclic GFR-binding peptide
  MOD_RES (14)..(15): Xaa is C or S
YYLMSTASTKVPAXXTS

SEQ ID NO: 12569 - protein, 17 aa, Artificial Sequence
  Cyclic GFR-binding peptide
VVNKNEDFYLINIPSMK

SEQ ID NO: 12570 - protein, 13 aa, Artificial Sequence
  Cyclic GFR-binding peptide
YYLISTASMKEPV

SEQ ID NO: 12571 - protein, 19 aa, Artificial Sequence
  Cyclic GFR-binding peptide
  MOD_RES (14)..(15): Xaa is C or S
LYLMSIPEMKTPTXXPGAS

SEQ ID NO: 12572 - protein, 21 aa, Artificial Sequence
  Cyclic GFR-binding peptide
  MOD_RES (15)..(16): Xaa is C or S
DKYLISIPSMKEPVXXPEPIG

SEQ ID NO: 12573 - protein, 27 aa, Artificial Sequence
  Cyclic GFR-binding peptide
  MOD_RES (21)..(22): Xaa is C or S
VVNKNEDLYLISIPEMKEPVXXPEPIG

SEQ ID NO: 12574 - protein, 13 aa, Artificial Sequence
  Cyclic GFR-binding peptide
LYLMSIPETKVPA

SEQ ID NO: 12575 - protein, 27 aa, Artificial Sequence
  Cyclic GFR-binding peptide
  MOD_RES (21)..(22): Xaa is C or S
IIQQKDNLYLMSIPEMKTPTXXPGASG

SEQ ID NO: 12576 - protein, 16 aa, Artificial Sequence
  Cyclic GFR-binding peptide
  MOD_RES (14)..(15): Xaa is C or S
KYLMSIPSTKVPAXXT

SEQ ID NO: 12577 - protein, 25 aa, Artificial Sequence
  Cyclic GFR-binding peptide
  MOD_RES (19)..(20): Xaa is C or S
NNASDYYLISTASLRTPVXXTPPTS

SEQ ID NO: 12578 - protein, 16 aa, Artificial Sequence
  Cyclic GFR-binding peptide
VKPKRGVFYLINIPSL

SEQ ID NO: 12579 - protein, 13 aa, Artificial Sequence
  Cyclic GFR-binding peptide
YYLISTASLKTPV

SEQ ID NO: 12580 - protein, 17 aa, Artificial Sequence
  Cyclic GFR-binding peptide
  MOD_RES (14)..(15): Xaa is C or S
KYLMSIPSTKVPAXXTS

SEQ ID NO: 12581 - protein, 15 aa, Artificial Sequence
  Cyclic GFR-binding peptide
  MOD_RES (14)..(15): Xaa is C or S
LYLISIPELRTPVXX

SEQ ID NO: 12582 - protein, 17 aa, Artificial Sequence
  Cyclic GFR-binding peptide
VVNKNEDFYLISIANMK

SEQ ID NO: 12583 - protein, 18 aa, Artificial Sequence
  Cyclic GFR-binding peptide
VVNKNEDFYLINIPSMKE

SEQ ID NO: 12584 - protein, 19 aa, Artificial Sequence
  Cyclic GFR-binding peptide
YTVVGKDYYLISTASLKTP

SEQ ID NO: 12585 - protein, 20 aa, Artificial Sequence
  Cyclic GFR-binding peptide
  MOD_RES (14)..(15): Xaa is C or S
KYLMSIPSMKTPTXXPGASG

SEQ ID NO: 12586 - protein, 23 aa, Artificial Sequence
  Cyclic GFR-binding peptide
  MOD_RES (17)..(18): Xaa is C or S
ASDYYLISTASLRTPVXXTPPTS

SEQ ID NO: 12587 - protein, 26 aa, Artificial Sequence
  Cyclic GFR-binding peptide
  MOD_RES (20)..(21): Xaa is C or S
VNNASDYYLISTASLRTPVXXTPPTS

SEQ ID NO: 12588 - protein, 27 aa, Artificial Sequence
  Cyclic GFR-binding peptide
  MOD_RES (21)..(22): Xaa is C or S
VKPTRGVFYLINIPSLDQPVXXPSASA

SEQ ID NO: 12589 - protein, 26 aa, Artificial Sequence
  Cyclic GFR-binding peptide
  MOD_RES (20)..(21): Xaa is C or S
IQQKDNLYLMSIPEMKTPTXXPGASG

SEQ ID NO: 12590 - protein, 18 aa, Artificial Sequence
  Cyclic GFR-binding peptide
VVNNASDYYLISTASLRT

SEQ ID NO: 12591 - protein, 16 aa, Artificial Sequence
  Cyclic GFR-binding peptide
VVNKNEDFYLINIPSM

SEQ ID NO: 12592 - protein, 22 aa, Artificial Sequence
  Cyclic GFR-binding peptide
  MOD_RES (16)..(17): Xaa is C or S
SDKYLISIPSLRTPVXXTPPTS

SEQ ID NO: 12593 - protein, 15 aa, Artificial Sequence
  Cyclic GFR-binding peptide
  MOD_RES (14)..(15): Xaa is C or S
YYLISTASLRAPVXX

SEQ ID NO: 12594 - protein, 18 aa, Artificial Sequence
  Cyclic GFR-binding peptide
LLVRGNDYYLMSTASTKV

SEQ ID NO: 12595 - protein, 22 aa, Artificial Sequence
  Cyclic GFR-binding peptide
  MOD_RES (16)..(17): Xaa is C or S
SDLYLISIPELRTPVXXTPPTS

SEQ ID NO: 12596 - protein, 22 aa, Artificial Sequence
  Cyclic GFR-binding peptide
  MOD_RES (16)..(17): Xaa is C or S
DNKYLMSIPSMKTPTXXPGASG

SEQ ID NO: 12597 - protein, 14 aa, Artificial Sequence
  Cyclic GFR-binding peptide
  MOD_RES (14)..(14): Xaa is C or S
YYLISTASLRAPVX

SEQ ID NO: 12598 - protein, 16 aa, Artificial Sequence
  Cyclic GFR-binding peptide
VKPTRGVFYLINIPSL

SEQ ID NO: 12599 - protein, 23 aa, Artificial Sequence
  Cyclic GFR-binding peptide
  MOD_RES (17)..(18): Xaa is C or S
KGIFYLINIPSLDQSVXXPSASA

SEQ ID NO: 12600 - protein, 20 aa, Artificial Sequence
  Cyclic GFR-binding peptide
  MOD_RES (14)..(15): Xaa is C or S
KYLVSIPSLKTPAXXPKPVH

SEQ ID NO: 12601 - protein, 25 aa, Artificial Sequence
  Cyclic GFR-binding peptide
  MOD_RES (19)..(20): Xaa is C or S
NSSDDYYLVSTASLKTPAXXPKPVH

SEQ ID NO: 12602 - protein, 23 aa, Artificial Sequence
  Cyclic GFR-binding peptide
  MOD_RES (17)..(18): Xaa is C or S
AADYYLISTASLRAPVXXSAPAA

SEQ ID NO: 12603 - protein, 22 aa, Artificial Sequence
  Cyclic GFR-binding peptide
  MOD_RES (16)..(17): Xaa is C or S
DNLYLMSIPEMKTPTXXPGASG

SEQ ID NO: 12604 - protein, 15 aa, Artificial Sequence
  Cyclic GFR-binding peptide
LLVRGNDYYLMSTAS

SEQ ID NO: 12605 - protein, 18 aa, Artificial Sequence
  Cyclic GFR-binding peptide
IIQQKDNYYLMSTASMKT

SEQ ID NO: 12606 - protein, 14 aa, Artificial Sequence
  Cyclic GFR-binding peptide
  MOD_RES (14)..(14): Xaa is C or S
FYLINIPSLAQPVX

SEQ ID NO: 12607 - protein, 17 aa, Artificial Sequence
  Cyclic GFR-binding peptide
  MOD_RES (14)..(15): Xaa is C or S
YYLISTASLRTPVXXTP

SEQ ID NO: 12608 - protein, 27 aa, Artificial Sequence
  Cyclic GFR-binding peptide
  MOD_RES (21)..(22): Xaa is C or S
LLVRGNDLYLMSIPETKVPAXXTSPVR

SEQ ID NO: 12609 - protein, 22 aa, Artificial Sequence
  Cyclic GFR-binding peptide
  MOD_RES (16)..(17): Xaa is C or S
EDFYLINIPSMKEPVXXPEPIG

SEQ ID NO: 12610 - protein, 18 aa, Artificial Sequence
  Cyclic GFR-binding peptide
  MOD_RES (14)..(15): Xaa is C or S
FYLINIPSLDQSVXXPSA

SEQ ID NO: 12611 - protein, 18 aa, Artificial Sequence
  Cyclic GFR-binding peptide
  MOD_RES (14)..(15): Xaa is C or S
KYLISIPSLRTPVXXTPP

SEQ ID NO: 12612 - protein, 16 aa, Artificial Sequence
  Cyclic GFR-binding peptide
LLVRGNDKYLMSIPST

SEQ ID NO: 12613 - protein, 25 aa, Artificial Sequence
  Cyclic GFR-binding peptide
  MOD_RES (19)..(20): Xaa is C or S
PKRGVFYLINIPSLAQPVXXPAASA

SEQ ID NO: 12614 - protein, 27 aa, Artificial Sequence
  Cyclic GFR-binding peptide
  MOD_RES (21)..(22): Xaa is C or S
IIQQKDNYYLMSTASMKTPTXXPGASG

SEQ ID NO: 12615 - protein, 16 aa, Artificial Sequence
  Cyclic GFR-binding peptide
  MOD_RES (14)..(15): Xaa is C or S
FYLISIANMKEPVXXP

SEQ ID NO: 12616 - protein, 27 aa, Artificial Sequence
  Cyclic GFR-binding peptide
  MOD_RES (21)..(22): Xaa is C or S
IVNSSDDLYLVSIPELKTPAXXPKPVH

SEQ ID NO: 12617 - protein, 20 aa, Artificial Sequence
  Cyclic GFR-binding peptide
  MOD_RES (14)..(15): Xaa is C or S
KYLISIPSLRTPVXXTPPTS

SEQ ID NO: 12618 - protein, 22 aa, Artificial Sequence
  Cyclic GFR-binding peptide
  MOD_RES (16)..(17): Xaa is C or S
EDKYLISIPSMKEPVXXPEPIG

SEQ ID NO: 12619 - protein, 15 aa, Artificial Sequence
  Cyclic GFR-binding peptide
VKPKRGVFYLINIPS

SEQ ID NO: 12620 - protein, 14 aa, Artificial Sequence
  Cyclic GFR-binding peptide
  MOD_RES (14)..(14): Xaa is C or S
FYLINIPSLDQSVX

SEQ ID NO: 12621 - protein, 27 aa, Artificial Sequence
  Cyclic GFR-binding peptide
  MOD_RES (21)..(22): Xaa is C or S
VVNKNEDYYLISTASMKEPVXXPEPIG

SEQ ID NO: 12622 - protein, 23 aa, Artificial Sequence
  Cyclic GFR-binding peptide
  MOD_RES (17)..(18): Xaa is C or S
ASDLYLISIPELRTPVXXTPPTS

SEQ ID NO: 12623 - protein, 21 aa, Artificial Sequence
  Cyclic GFR-binding peptide
  MOD_RES (15)..(16): Xaa is C or S
DLYLMSIPETKVPAXXTSPVR

SEQ ID NO: 12624 - protein, 17 aa, Artificial Sequence
  Cyclic GFR-binding peptide
VVNKNEDYYLISTASMK

SEQ ID NO: 12625 - protein, 16 aa, Artificial Sequence
  Cyclic GFR-binding peptide
LLVRGNDLYLMSIPET

SEQ ID NO: 12626 - protein, 22 aa, Artificial Sequence
  Cyclic GFR-binding peptide
  MOD_RES (16)..(17): Xaa is C or S
EDLYLISIPEMKEPVXXPEPIG

SEQ ID NO: 12627 - protein, 17 aa, Artificial Sequence
  Cyclic GFR-binding peptide
  MOD_RES (14)..(15): Xaa is C or S
YYLISTASLRAPVXXSA

SEQ ID NO: 12628 - protein, 22 aa, Artificial Sequence
  Cyclic GFR-binding peptide
  MOD_RES (16)..(17): Xaa is C or S
GVFYLINIPSLAQPVXXPAASA

SEQ ID NO: 12629 - protein, 21 aa, Artificial Sequence
  Cyclic GFR-binding peptide
  MOD_RES (15)..(16): Xaa is C or S
DYYLISTASLRTPVXXTPPTS

SEQ ID NO: 12630 - protein, 27 aa, Artificial Sequence
  Cyclic GFR-binding peptide
  MOD_RES (21)..(22): Xaa is C or S
VVNNASDLYLISIPELRTPVXXTPPTS

SEQ ID NO: 12631 - protein, 19 aa, Artificial Sequence
  Cyclic GFR-binding peptide
  MOD_RES (14)..(15): Xaa is C or S
FYLINIPSLDQSVXXPSAS

SEQ ID NO: 12632 - protein, 21 aa, Artificial Sequence
  Cyclic GFR-binding peptide
  MOD_RES (15)..(16): Xaa is C or S
DLYLISIPELRTPVXXTPPTS

SEQ ID NO: 12633 - protein, 26 aa, Artificial Sequence
  Cyclic GFR-binding peptide
  MOD_RES (20)..(21): Xaa is C or S
VNNASDLYLISIPELRTPVXXTPPTS

SEQ ID NO: 12634 - protein, 18 aa, Artificial Sequence
  Cyclic GFR-binding peptide
VVNKNEDFYLISIANMKE

SEQ ID NO: 12635 - protein, 20 aa, Artificial Sequence
  Cyclic GFR-binding peptide
  MOD_RES (14)..(15): Xaa is C or S
FYLISIANMKEPVXXPEPIG

SEQ ID NO: 12636 - protein, 17 aa, Artificial Sequence
  Cyclic GFR-binding peptide
  MOD_RES (14)..(15): Xaa is C or S
KYLISIPSMKEPVXXPE

SEQ ID NO: 12637 - protein, 19 aa, Artificial Sequence
  Cyclic GFR-binding peptide
VVNKNEDYYLISTASMKEP

SEQ ID NO: 12638 - protein, 13 aa, Artificial Sequence
  Cyclic GFR-binding peptide
FYLINIPSLAQPV

SEQ ID NO: 12639 - protein, 16 aa, Artificial Sequence
  Cyclic GFR-binding peptide
VVNNASDLYLISIPEL

SEQ ID NO: 12640 - protein, 15 aa, Artificial Sequence
  Cyclic GFR-binding peptide
IKPTKGIFYLINIPS

SEQ ID NO: 12641 - protein, 16 aa, Artificial Sequence
  Cyclic GFR-binding peptide
VVNKNEDKYLISIPSM

SEQ ID NO: 12642 - protein, 21 aa, Artificial Sequence
  Cyclic GFR-binding peptide
  MOD_RES (15)..(16): Xaa is C or S
DYYLMSTASTKVPAXXTSPVR

SEQ ID NO: 12643 - protein, 18 aa, Artificial Sequence
  Cyclic GFR-binding peptide
IKPTKGIFYLINIPSLDQ

SEQ ID NO: 12644 - protein, 26 aa, Artificial Sequence
  Cyclic GFR-binding peptide
  MOD_RES (20)..(21): Xaa is C or S
VNSSDDLYLVSIPELKTPAXXPKPVH

SEQ ID NO: 12645 - protein, 26 aa, Artificial Sequence
  Cyclic GFR-binding peptide
  MOD_RES (20)..(21): Xaa is C or S
VNNAADYYLISTASLRAPVXXSAPAA

SEQ ID NO: 12646 - protein, 17 aa, Artificial Sequence
  Cyclic GFR-binding peptide
  MOD_RES (14)..(15): Xaa is C or S
LYLISIPELRTPVXXTP

SEQ ID NO: 12647 - protein, 13 aa, Artificial Sequence
  Cyclic GFR-binding peptide
KYLMSIPSMKTPT

SEQ ID NO: 12648 - protein, 25 aa, Artificial Sequence
  Cyclic GFR-binding peptide
  MOD_RES (19)..(20): Xaa is C or S
PTKGIFYLINIPSLDQSVXXPSASA

SEQ ID NO: 12649 - protein, 26 aa, Artificial Sequence
  Cyclic GFR-binding peptide
  MOD_RES (20)..(21): Xaa is C or S
VNKNEDFYLINIPSMKEPVXXPEPIG

SEQ ID NO: 12650 - protein, 13 aa, Artificial Sequence
  Cyclic GFR-binding peptide
FYLINIPSLDQSV

SEQ ID NO: 12651 - protein, 19 aa, Artificial Sequence
  Cyclic GFR-binding peptide
LLVRGNDLYLMSIPETKVP

SEQ ID NO: 12652 - protein, 22 aa, Artificial Sequence
  Cyclic GFR-binding peptide
  MOD_RES (16)..(17): Xaa is C or S
KDYYLISTASLKTPVXXAKSAK

SEQ ID NO: 12653 - protein, 22 aa, Artificial Sequence
  Cyclic GFR-binding peptide
  MOD_RES (16)..(17): Xaa is C or S
EDFYLISIANMKEPVXXPEPIG

SEQ ID NO: 12654 - protein, 27 aa, Artificial Sequence
  Cyclic GFR-binding peptide
  MOD_RES (21)..(22): Xaa is C or S
LLVRGNDKYLMSIPSTKVPAXXTSPVR

SEQ ID NO: 12655 - protein, 26 aa, Artificial Sequence
  Cyclic GFR-binding peptide
  MOD_RES (20)..(21): Xaa is C or S
LVRGNDLYLMSIPETKVPAXXTSPVR

SEQ ID NO: 12656 - protein, 19 aa, Artificial Sequence
  Cyclic GFR-binding peptide
  MOD_RES (14)..(15): Xaa is C or S
FYLISIANMKEPVXXPEPI

SEQ ID NO: 12657 - protein, 19 aa, Artificial Sequence
  Cyclic GFR-binding peptide
IKPTKGIFYLINIPSLDQS

SEQ ID NO: 12658 - protein, 18 aa, Artificial Sequence
  Cyclic GFR-binding peptide
  MOD_RES (14)..(15): Xaa is C or S
KYLISIPSMKEPVXXPEP

SEQ ID NO: 12659 - protein, 14 aa, Artificial Sequence
  Cyclic GFR-binding peptide
  MOD_RES (14)..(14): Xaa is C or S
YYLISTASLKTPVX

SEQ ID NO: 12660 - protein, 25 aa, Artificial Sequence
  Cyclic GFR-binding peptide
  MOD_RES (19)..(20): Xaa is C or S
VRGNDLYLMSIPETKVPAXXTSPVR

SEQ ID NO: 12661 - protein, 27 aa, Artificial Sequence
  Cyclic GFR-binding peptide
  MOD_RES (21)..(22): Xaa is C or S
IVNSSDDKYLVSIPSLKTPAXXPKPVH

SEQ ID NO: 12662 - protein, 17 aa, Artificial Sequence
  Cyclic GFR-binding peptide
  MOD_RES (14)..(15): Xaa is C or S
YYLISTASMKEPVXXPE

SEQ ID NO: 12663 - protein, 14 aa, Artificial Sequence
  Cyclic GFR-binding peptide
  MOD_RES (14)..(14): Xaa is C or S
FYLISIANMKEPVX

SEQ ID NO: 12664 - protein, 17 aa, Artificial Sequence
  Cyclic GFR-binding peptide
  MOD_RES (14)..(15): Xaa is C or S
YYLISTASLKTPVXXAK

SEQ ID NO: 12665 - protein, 13 aa, Artificial Sequence
  Cyclic GFR-binding peptide
YYLISTASLRAPV

SEQ ID NO: 12666 - protein, 23 aa, Artificial Sequence
  Cyclic GFR-binding peptide
  MOD_RES (17)..(18): Xaa is C or S
RGVFYLINIPSLDQPVXXPSASA

SEQ ID NO: 12667 - protein, 19 aa, Artificial Sequence
  Cyclic GFR-binding peptide
  MOD_RES (14)..(15): Xaa is C or S
LYLISIPEMKEPVXXPEPI

SEQ ID NO: 12668 - protein, 24 aa, Artificial Sequence
  Cyclic GFR-binding peptide
  MOD_RES (18)..(19): Xaa is C or S
KNEDKYLISIPSMKEPVXXPEPIG

SEQ ID NO: 12669 - protein, 16 aa, Artificial Sequence
  Cyclic GFR-binding peptide
  MOD_RES (14)..(15): Xaa is C or S
KYLISIPSLRTPVXXT

SEQ ID NO: 12670 - protein, 16 aa, Artificial Sequence
  Cyclic GFR-binding peptide
VVNKNEDFYLISIANM

SEQ ID NO: 12671 - protein, 23 aa, Artificial Sequence
  Cyclic GFR-binding peptide
  MOD_RES (17)..(18): Xaa is C or S
SDDYYLVSTASLKTPAXXPKPVH

SEQ ID NO: 12672 - protein, 24 aa, Artificial Sequence
  Cyclic GFR-binding peptide
  MOD_RES (18)..(19): Xaa is C or S
NASDKYLISIPSLRTPVXXTPPTS

SEQ ID NO: 12673 - protein, 24 aa, Artificial Sequence
  Cyclic GFR-binding peptide
  MOD_RES (18)..(19): Xaa is C or S
TRGVFYLINIPSLDQPVXXPSASA

SEQ ID NO: 12674 - protein, 15 aa, Artificial Sequence
  Cyclic GFR-binding peptide
  MOD_RES (14)..(15): Xaa is C or S
YYLISTASLKTPVXX

SEQ ID NO: 12675 - protein, 25 aa, Artificial Sequence
  Cyclic GFR-binding peptide
  MOD_RES (19)..(20): Xaa is C or S
NKNEDFYLISIANMKEPVXXPEPIG

SEQ ID NO: 12676 - protein, 17 aa, Artificial Sequence
  Cyclic GFR-binding peptide
LLVRGNDYYLMSTASTK

SEQ ID NO: 12677 - protein, 16 aa, Artificial Sequence
  Cyclic GFR-binding peptide
  MOD_RES (14)..(15): Xaa is C or S
LYLMSIPEMKTPTXXP

SEQ ID NO: 12678 - protein, 20 aa, Artificial Sequence
  Cyclic GFR-binding peptide
  MOD_RES (14)..(15): Xaa is C or S
YYLISTASLKTPVXXAKSAK

SEQ ID NO: 12679 - protein, 24 aa, Artificial Sequence
  Cyclic GFR-binding peptide
  MOD_RES (18)..(19): Xaa is C or S
VGKDYYLISTASLKTPVXXAKSAK

SEQ ID NO: 12680 - protein, 23 aa, Artificial Sequence
  Cyclic GFR-binding peptide
  MOD_RES (17)..(18): Xaa is C or S
SDDKYLVSIPSLKTPAXXPKPVH

SEQ ID NO: 12681 - protein, 19 aa, Artificial Sequence
  Cyclic GFR-binding peptide
  MOD_RES (14)..(15): Xaa is C or S
YYLISTASMKEPVXXPEPI

SEQ ID NO: 12682 - protein, 18 aa, Artificial Sequence
  Cyclic GFR-binding peptide
  MOD_RES (14)..(15): Xaa is C or S
YYLISTASLRTPVXXTPP

SEQ ID NO: 12683 - protein, 22 aa, Artificial Sequence
  Cyclic GFR-binding peptide
  MOD_RES (16)..(17): Xaa is C or S
EDYYLISTASMKEPVXXPEPIG

SEQ ID NO: 12684 - protein, 17 aa, Artificial Sequence
  Cyclic GFR-binding peptide
IKPTKGIFYLINIPSLD

SEQ ID NO: 12685 - protein, 17 aa, Artificial Sequence
  Cyclic GFR-binding peptide
  MOD_RES (14)..(15): Xaa is C or S
LYLISIPEMKEPVXXPE

SEQ ID NO: 12686 - protein, 26 aa, Artificial Sequence
  Cyclic GFR-binding peptide
  MOD_RES (20)..(21): Xaa is C or S
VNSSDDKYLVSIPSLKTPAXXPKPVH

SEQ ID NO: 12687 - protein, 19 aa, Artificial Sequence
  Cyclic GFR-binding peptide
VKPKRGVFYLINIPSLAQP

SEQ ID NO: 12688 - protein, 26 aa, Artificial Sequence
  Cyclic GFR-binding peptide
  MOD_RES (20)..(21): Xaa is C or S
KPKRGVFYLINIPSLAQPVXXPAASA

SEQ ID NO: 12689 - protein, 17 aa, Artificial Sequence
  Cyclic GFR-binding peptide
IIQQKDNKYLMSIPSMK

SEQ ID NO: 12690 - protein, 17 aa, Artificial Sequence
  Cyclic GFR-binding peptide
VVNNASDLYLISIPELR

SEQ ID NO: 12691 - protein, 18 aa, Artificial Sequence
  Cyclic GFR-binding peptide
VKPTRGVFYLINIPSLDQ

SEQ ID NO: 12692 - protein, 17 aa, Artificial Sequence
  Cyclic GFR-binding peptide
  MOD_RES (14)..(15): Xaa is C or S
KYLMSIPSMKTPTXXPG

SEQ ID NO: 12693 - protein, 20 aa, Artificial Sequence
  Cyclic GFR-binding peptide
  MOD_RES (14)..(15): Xaa is C or S
LYLISIPEMKEPVXXPEPIG

SEQ ID NO: 12694 - protein, 19 aa, Artificial Sequence
  Cyclic GFR-binding peptide
  MOD_RES (14)..(15): Xaa is C or S
KYLISIPSLRTPVXXTPPT

SEQ ID NO: 12695 - protein, 25 aa, Artificial Sequence
  Cyclic GFR-binding peptide
  MOD_RES (19)..(20): Xaa is C or S
NKNEDKYLISIPSMKEPVXXPEPIG

SEQ ID NO: 12696 - protein, 17 aa, Artificial Sequence
  Cyclic GFR-binding peptide
IIQQKDNLYLMSIPEMK

SEQ ID NO: 12697 - protein, 17 aa, Artificial Sequence
  Cyclic GFR-binding peptide
VKPKRGVFYLINIPSLA

SEQ ID NO: 12698 - protein, 17 aa, Artificial Sequence
  Cyclic GFR-binding peptide
VVNNASDKYLISIPSLR

SEQ ID NO: 12699 - protein, 24 aa, Artificial Sequence
  Cyclic GFR-binding peptide
  MOD_RES (18)..(19): Xaa is C or S
SSDDKYLVSIPSLKTPAXXPKPVH

SEQ ID NO: 12700 - protein, 13 aa, Artificial Sequence
  Cyclic GFR-binding peptide
FYLISIANMKEPV

SEQ ID NO: 12701 - protein, 20 aa, Artificial Sequence
  Cyclic GFR-binding peptide
  MOD_RES (14)..(15): Xaa is C or S
YYLISTASLRTPVXXTPPTS

SEQ ID NO: 12702 - protein, 15 aa, Artificial Sequence
  Cyclic GFR-binding peptide
VVNKNEDYYLISTAS

SEQ ID NO: 12703 - protein, 23 aa, Artificial Sequence
  Cyclic GFR-binding peptide
  MOD_RES (17)..(18): Xaa is C or S
SDDLYLVSIPELKTPAXXPKPVH

SEQ ID NO: 12704 - protein, 23 aa, Artificial Sequence
  Cyclic GFR-binding peptide
  MOD_RES (17)..(18): Xaa is C or S
NEDKYLISIPSMKEPVXXPEPIG

SEQ ID NO: 12705 - protein, 16 aa, Artificial Sequence
  Cyclic GFR-binding peptide
IIQQKDNLYLMSIPEM

SEQ ID NO: 12706 - protein, 26 aa, Artificial Sequence
  Cyclic GFR-binding peptide
  MOD_RES (20)..(21): Xaa is C or S
LVRGNDYYLMSTASTKVPAXXTSPVR

SEQ ID NO: 12707 - protein, 17 aa, Artificial Sequence
  Cyclic GFR-binding peptide
  MOD_RES (14)..(15): Xaa is C or S
FYLINIPSMKEPVXXPE

SEQ ID NO: 12708 - protein, 19 aa, Artificial Sequence
  Cyclic GFR-binding peptide
IIQQKDNLYLMSIPEMKTP

SEQ ID NO: 12709 - protein, 24 aa, Artificial Sequence
  Cyclic GFR-binding peptide
  MOD_RES (18)..(19): Xaa is C or S
SSDDLYLVSIPELKTPAXXPKPVH

SEQ ID NO: 12710 - protein, 21 aa, Artificial Sequence
  Cyclic GFR-binding peptide
  MOD_RES (15)..(16): Xaa is C or S
NLYLMSIPEMKTPTXXPGASG

SEQ ID NO: 12711 - protein, 13 aa, Artificial Sequence
  Cyclic GFR-binding peptide
KYLISIPSLRTPV

SEQ ID NO: 12712 - protein, 15 aa, Artificial Sequence
  Cyclic GFR-binding peptide
VVNNAADYYLISTAS

SEQ ID NO: 12713 - protein, 19 aa, Artificial Sequence
  Cyclic GFR-binding peptide
  MOD_RES (14)..(15): Xaa is C or S
YYLISTASLKTPVXXAKSA

SEQ ID NO: 12714 - protein, 24 aa, Artificial Sequence
  Cyclic GFR-binding peptide
  MOD_RES (18)..(19): Xaa is C or S
QKDNYYLMSTASMKTPTXXPGASG

SEQ ID NO: 12715 - protein, 18 aa, Artificial Sequence
  Cyclic GFR-binding peptide
VVNKNEDKYLISIPSMKE

SEQ ID NO: 12716 - protein, 25 aa, Artificial Sequence
  Cyclic GFR-binding peptide
  MOD_RES (19)..(20): Xaa is C or S
NSSDDKYLVSIPSLKTPAXXPKPVH

SEQ ID NO: 12717 - protein, 19 aa, Artificial Sequence
  Cyclic GFR-binding peptide
VVNNASDLYLISIPELRTP

SEQ ID NO: 12718 - protein, 17 aa, Artificial Sequence
  Cyclic GFR-binding peptide
  MOD_RES (14)..(15): Xaa is C or S
KYLISIPSLRTPVXXTP

SEQ ID NO: 12719 - protein, 15 aa, Artificial Sequence
  Cyclic GFR-binding peptide
  MOD_RES (14)..(15): Xaa is C or S
YYLMSTASMKTPTXX

SEQ ID NO: 12720 - protein, 17 aa, Artificial Sequence
  Cyclic GFR-binding peptide
VVNNASDYYLISTASLR

SEQ ID NO: 12721 - protein, 23 aa, Artificial Sequence
  Cyclic GFR-binding peptide
  MOD_RES (17)..(18): Xaa is C or S
GNDKYLMSIPSTKVPAXXTSPVR

SEQ ID NO: 12722 - protein, 23 aa, Artificial Sequence
  Cyclic GFR-binding peptide
  MOD_RES (17)..(18): Xaa is C or S
NEDYYLISTASMKEPVXXPEPIG

SEQ ID NO: 12723 - protein, 15 aa, Artificial Sequence
  Cyclic GFR-binding peptide
  MOD_RES (14)..(15): Xaa is C or S
FYLINIPSLAQPVXX

SEQ ID NO: 12724 - protein, 19 aa, Artificial Sequence
  Cyclic GFR-binding peptide
LLVRGNDKYLMSIPSTKVP

SEQ ID NO: 12725 - protein, 27 aa, Artificial Sequence
  Cyclic GFR-binding peptide
  MOD_RES (21)..(22): Xaa is C or S
VKPKRGVFYLINIPSLAQPVXXPAASA

SEQ ID NO: 12726 - protein, 24 aa, Artificial Sequence
  Cyclic GFR-binding peptide
  MOD_RES (18)..(19): Xaa is C or S
SSDDYYLVSTASLKTPAXXPKPVH

SEQ ID NO: 12727 - protein, 17 aa, Artificial Sequence
  Cyclic GFR-binding peptide
VVNKNEDKYLISIPSMK

SEQ ID NO: 12728 - protein, 18 aa, Artificial Sequence
  Cyclic GFR-binding peptide
  MOD_RES (14)..(15): Xaa is C or S
YYLISTASLRAPVXXSAP

SEQ ID NO: 12729 - protein, 18 aa, Artificial Sequence
  Cyclic GFR-binding peptide
VVNNASDLYLISIPELRT

SEQ ID NO: 12730 - protein, 18 aa, Artificial Sequence
  Cyclic GFR-binding peptide
  MOD_RES (14)..(15): Xaa is C or S
FYLINIPSLAQPVXXPAA

SEQ ID NO: 12731 - protein, 15 aa, Artificial Sequence
  Cyclic GFR-binding peptide
  MOD_RES (14)..(15): Xaa is C or S
FYLINIPSMKEPVXX

SEQ ID NO: 12732 - protein, 25 aa, Artificial Sequence
  Cyclic GFR-binding peptide
  MOD_RES (19)..(20): Xaa is C or S
NKNEDLYLISIPEMKEPVXXPEPIG

SEQ ID NO: 12733 - protein, 23 aa, Artificial Sequence
  Cyclic GFR-binding peptide
  MOD_RES (17)..(18): Xaa is C or S
ASDKYLISIPSLRTPVXXTPPTS

SEQ ID NO: 12734 - protein, 26 aa, Artificial Sequence
  Cyclic GFR-binding peptide
  MOD_RES (20)..(21): Xaa is C or S
VNKNEDYYLISTASMKEPVXXPEPIG

SEQ ID NO: 12735 - protein, 18 aa, Artificial Sequence
  Cyclic GFR-binding peptide
IIQQKDNLYLMSIPEMKT

SEQ ID NO: 12736 - protein, 17 aa, Artificial Sequence
  Cyclic GFR-binding peptide
LLVRGNDKYLMSIPSTK

SEQ ID NO: 12737 - protein, 20 aa, Artificial Sequence
  Cyclic GFR-binding peptide
  MOD_RES (14)..(15): Xaa is C or S
KYLISIPSMKEPVXXPEPIG

SEQ ID NO: 12738 - protein, 27 aa, Artificial Sequence
  Cyclic GFR-binding peptide
  MOD_RES (21)..(22): Xaa is C or S
VVNNASDKYLISIPSLRTPVXXTPPTS

SEQ ID NO: 12739 - protein, 23 aa, Artificial Sequence
  Cyclic GFR-binding peptide
  MOD_RES (17)..(18): Xaa is C or S
GKDYYLISTASLKTPVXXAKSAK

SEQ ID NO: 12740 - protein, 17 aa, Artificial Sequence
  Cyclic GFR-binding peptide
IIQQKDNYYLMSTASMK

SEQ ID NO: 12741 - protein, 21 aa, Artificial Sequence
  Cyclic GFR-binding peptide
  MOD_RES (15)..(16): Xaa is C or S
VFYLINIPSLDQPVXXPSASA

SEQ ID NO: 12742 - protein, 24 aa, Artificial Sequence
  Cyclic GFR-binding peptide
  MOD_RES (18)..(19): Xaa is C or S
QKDNLYLMSIPEMKTPTXXPGASG

SEQ ID NO: 12743 - protein, 24 aa, Artificial Sequence
  Cyclic GFR-binding peptide
  MOD_RES (18)..(19): Xaa is C or S
QKDNKYLMSIPSMKTPTXXPGASG

SEQ ID NO: 12744 - protein, 27 aa, Artificial Sequence
  Cyclic GFR-binding peptide
  MOD_RES (21)..(22): Xaa is C or S
LLVRGNDYYLMSTASTKVPAXXTSPVR

SEQ ID NO: 12745 - protein, 23 aa, Artificial Sequence
  Cyclic GFR-binding peptide
  MOD_RES (17)..(18): Xaa is C or S
GNDYYLMSTASTKVPAXXTSPVR

SEQ ID NO: 12746 - protein, 23 aa, Artificial Sequence
  Cyclic GFR-binding peptide
  MOD_RES (17)..(18): Xaa is C or S
RGVFYLINIPSLAQPVXXPAASA

SEQ ID NO: 12747 - protein, 18 aa, Artificial Sequence
  Cyclic GFR-binding peptide
VKPKRGVFYLINIPSLAQ

SEQ ID NO: 12748 - protein, 16 aa, Artificial Sequence
  Cyclic GFR-binding peptide
VVNKNEDLYLISIPEM

SEQ ID NO: 12749 - protein, 14 aa, Artificial Sequence
  Cyclic GFR-binding peptide
  MOD_RES (14)..(14): Xaa is C or S
YYLMSTASMKTPTX

SEQ ID NO: 12750 - protein, 15 aa, Artificial Sequence
  Cyclic GFR-binding peptide
  MOD_RES (14)..(15): Xaa is C or S
KYLMSIPSMKTPTXX

SEQ ID NO: 12751 - protein, 16 aa, Artificial Sequence
  Cyclic GFR-binding peptide
  MOD_RES (14)..(15): Xaa is C or S
FYLINIPSLDQSVXXP

SEQ ID NO: 12752 - protein, 27 aa, Artificial Sequence
  Cyclic GFR-binding peptide
  MOD_RES (21)..(22): Xaa is C or S
IVNSSDDYYLVSTASLKTPAXXPKPVH

SEQ ID NO: 12753 - protein, 23 aa, Artificial Sequence
  Cyclic GFR-binding peptide
  MOD_RES (17)..(18): Xaa is C or S
KDNYYLMSTASMKTPTXXPGASG

SEQ ID NO: 12754 - protein, 21 aa, Artificial Sequence
  Cyclic GFR-binding peptide
  MOD_RES (15)..(16): Xaa is C or S
DKYLMSIPSTKVPAXXTSPVR

SEQ ID NO: 12755 - protein, 23 aa, Artificial Sequence
  Cyclic GFR-binding peptide
  MOD_RES (17)..(18): Xaa is C or S
KDNKYLMSIPSMKTPTXXPGASG

SEQ ID NO: 12756 - protein, 16 aa, Artificial Sequence
  Cyclic GFR-binding peptide
VVNNASDKYLISIPSL

SEQ ID NO: 12757 - protein, 24 aa, Artificial Sequence
  Cyclic GFR-binding peptide
  MOD_RES (18)..(19): Xaa is C or S
NAADYYLISTASLRAPVXXSAPAA

SEQ ID NO: 12758 - protein, 15 aa, Artificial Sequence
  Cyclic GFR-binding peptide
VVNKNEDKYLISIPS

SEQ ID NO: 12759 - protein, 19 aa, Artificial Sequence
  Cyclic GFR-binding peptide
VVNKNEDKYLISIPSMKEP

SEQ ID NO: 12760 - protein, 21 aa, Artificial Sequence
  Cyclic GFR-binding peptide
  MOD_RES (15)..(16): Xaa is C or S
DFYLISIANMKEPVXXPEPIG

SEQ ID NO: 12761 - protein, 21 aa, Artificial Sequence
  Cyclic GFR-binding peptide
  MOD_RES (15)..(16): Xaa is C or S
DLYLVSIPELKTPAXXPKPVH

SEQ ID NO: 12762 - protein, 17 aa, Artificial Sequence
  Cyclic GFR-binding peptide
  MOD_RES (14)..(15): Xaa is C or S
FYLINIPSLDQSVXXPS

SEQ ID NO: 12763 - protein, 16 aa, Artificial Sequence
  Cyclic GFR-binding peptide
LLVRGNDYYLMSTAST

SEQ ID NO: 12764 - protein, 20 aa, Artificial Sequence
  Cyclic GFR-binding peptide
  MOD_RES (14)..(15): Xaa is C or S
FYLINIPSLDQPVXXPSASA

SEQ ID NO: 12765 - protein, 15 aa, Artificial Sequence
  Cyclic GFR-binding peptide
IIQQKDNYYLMSTAS

SEQ ID NO: 12766 - protein, 19 aa, Artificial Sequence
  Cyclic GFR-binding peptide
  MOD_RES (14)..(15): Xaa is C or S
FYLINIPSLAQPVXXPAAS

SEQ ID NO: 12767 - protein, 22 aa, Artificial Sequence
  Cyclic GFR-binding peptide
  MOD_RES (16)..(17): Xaa is C or S
GIFYLINIPSLDQSVXXPSASA

SEQ ID NO: 12768 - protein, 14 aa, Artificial Sequence
  Cyclic GFR-binding peptide
  MOD_RES (14)..(14): Xaa is C or S
KYLMSIPSMKTPTX

SEQ ID NO: 12769 - protein, 21 aa, Artificial Sequence
  Cyclic GFR-binding peptide
  MOD_RES (15)..(16): Xaa is C or S
IFYLINIPSLDQSVXXPSASA

SEQ ID NO: 12770 - protein, 14 aa, Artificial Sequence
  Cyclic GFR-binding peptide
  MOD_RES (14)..(14): Xaa is C or S
FYLINIPSMKEPVX

SEQ ID NO: 12771 - protein, 16 aa, Artificial Sequence
  Cyclic GFR-binding peptide
LSATSILYYDSANNVV

SEQ ID NO: 12772 - protein, 13 aa, Artificial Sequence
  Cyclic GFR-binding peptide
VPTRLSATSILYY

SEQ ID NO: 12773 - protein, 24 aa, Artificial Sequence
  Cyclic GFR-binding peptide
  MOD_RES (6)..(7): Xaa is C or S
GIPEPXXVPEKMSPINILYFDENK

SEQ ID NO: 12774 - protein, 14 aa, Artificial Sequence
  Cyclic GFR-binding peptide
  MOD_RES (1)..(1): Xaa is C or S
XVPEKMSATSILYY

SEQ ID NO: 12775 - protein, 18 aa, Artificial Sequence
  Cyclic GFR-binding peptide
  MOD_RES (4)..(5): Xaa is C or S
PEPXXVPEKMSPINILYF

SEQ ID NO: 12776 - protein, 19 aa, Artificial Sequence
  Cyclic GFR-binding peptide
  MOD_RES (5)..(6): Xaa is C or S
VPSTXXAPVKTSATSMLYY

SEQ ID NO: 12777 - protein, 21 aa, Artificial Sequence
  Cyclic GFR-binding peptide
  MOD_RES (6)..(7): Xaa is C or S
GIPEPXXVPEKMEPISILYLD

SEQ ID NO: 12778 - protein, 16 aa, Artificial Sequence
  Cyclic GFR-binding peptide
  MOD_RES (2)..(3): Xaa is C or S
PXXVPEKMSPISILYK

SEQ ID NO: 12779 - protein, 15 aa, Artificial Sequence
  Cyclic GFR-binding peptide
SPISMLYKNDKQQII

SEQ ID NO: 12780 - protein, 27 aa, Artificial Sequence
  Cyclic GFR-binding peptide
  MOD_RES (6)..(7): Xaa is C or S
GSAGPXXTPTKMSPISMLYKNDKQQII

SEQ ID NO: 12781 - protein, 24 aa, Artificial Sequence
  Cyclic GFR-binding peptide
  MOD_RES (6)..(7): Xaa is C or S
STPPTXXVPTRLEPISILYLDSAN

SEQ ID NO: 12782 - protein, 27 aa, Artificial Sequence
  Cyclic GFR-binding peptide
  MOD_RES (6)..(7): Xaa is C or S
GIPEPXXVPEKMSPISILYKDENKNVV

SEQ ID NO: 12783 - protein, 24 aa, Artificial Sequence
  Cyclic GFR-binding peptide
  MOD_RES (6)..(7): Xaa is C or S
GIPEPXXVPEKMSATSILYYDENK

SEQ ID NO: 12784 - protein, 25 aa, Artificial Sequence
  Cyclic GFR-binding peptide
  MOD_RES (6)..(7): Xaa is C or S
GIPEPXXVPEKMSATSILYYDENKN

SEQ ID NO: 12785 - protein, 14 aa, Artificial Sequence
  Cyclic GFR-binding peptide
  MOD_RES (1)..(1): Xaa is C or S
XVPQDLSPINILYF

SEQ ID NO: 12786 - protein, 21 aa, Artificial Sequence
  Cyclic GFR-binding peptide
  MOD_RES (6)..(7): Xaa is C or S
GSAGPXXTPTKMSATSMLYYN

SEQ ID NO: 12787 - protein, 17 aa, Artificial Sequence
  Cyclic GFR-binding peptide
  MOD_RES (3)..(4): Xaa is C or S
APXXVPQALSPINILYF

SEQ ID NO: 12788 - protein, 17 aa, Artificial Sequence
  Cyclic GFR-binding peptide
  MOD_RES (3)..(4): Xaa is C or S
GPXXTPTKMSATSMLYY

SEQ ID NO: 12789 - protein, 19 aa, Artificial Sequence
  Cyclic GFR-binding peptide
PVKTSATSMLYYDNGRVLL

SEQ ID NO: 12790 - protein, 22 aa, Artificial Sequence
  Cyclic GFR-binding peptide
  MOD_RES (6)..(7): Xaa is C or S
ASASPXXVPQDLSPINILYFVG

SEQ ID NO: 12791 - protein, 17 aa, Artificial Sequence
  Cyclic GFR-binding peptide
  MOD_RES (3)..(4): Xaa is C or S
SPXXVPQDLSPINILYF

SEQ ID NO: 12792 - protein, 15 aa, Artificial Sequence
  Cyclic GFR-binding peptide
  MOD_RES (1)..(2): Xaa is C or S
XXTPTKMEPISMLYL

SEQ ID NO: 12793 - protein, 13 aa, Artificial Sequence
  Cyclic GFR-binding peptide
TPTKMEPISMLYL

SEQ ID NO: 12794 - protein, 24 aa, Artificial Sequence
  Cyclic GFR-binding peptide
  MOD_RES (6)..(7): Xaa is C or S
ASASPXXVSQDLSPINILYFIGKT

SEQ ID NO: 12795 - protein, 24 aa, Artificial Sequence
  Cyclic GFR-binding peptide
  MOD_RES (6)..(7): Xaa is C or S
RVPSTXXAPVKTSATSMLYYDNGR

SEQ ID NO: 12796 - protein, 15 aa, Artificial Sequence
  Cyclic GFR-binding peptide
SPISILYKDSANNVV

SEQ ID NO: 12797 - protein, 15 aa, Artificial Sequence
  Cyclic GFR-binding peptide
  MOD_RES (1)..(2): Xaa is C or S
XXAPVKTSATSMLYY

SEQ ID NO: 12798 - protein, 19 aa, Artificial Sequence
  Cyclic GFR-binding peptide
  MOD_RES (5)..(6): Xaa is C or S
SASPXXVPQDLSPINILYF

SEQ ID NO: 12799 - protein, 20 aa, Artificial Sequence
  Cyclic GFR-binding peptide
  MOD_RES (6)..(7): Xaa is C or S
GIPEPXXVPEKMSATSILYY

SEQ ID NO: 12800 - protein, 22 aa, Artificial Sequence
  Cyclic GFR-binding peptide
  MOD_RES (6)..(7): Xaa is C or S
RVPSTXXAPVKTEPISMLYLDN

SEQ ID NO: 12801 - protein, 18 aa, Artificial Sequence
  Cyclic GFR-binding peptide
  MOD_RES (4)..(5): Xaa is C or S
PSTXXAPVKTEPISMLYL

SEQ ID NO: 12802 - protein, 20 aa, Artificial Sequence
  Cyclic GFR-binding peptide
  MOD_RES (6)..(7): Xaa is C or S
AAPASXXVPARLSATSILYY

SEQ ID NO: 12803 - protein, 15 aa, Artificial Sequence
  Cyclic GFR-binding peptide
EPISILYLDSANNVV

SEQ ID NO: 12804 - protein, 19 aa, Artificial Sequence
  Cyclic GFR-binding peptide
PEKMSPINILYFDENKNVV

SEQ ID NO: 12805 - protein, 15 aa, Artificial Sequence
  Cyclic GFR-binding peptide
SPINILYFVGRTPKV

SEQ ID NO: 12806 - protein, 18 aa, Artificial Sequence
  Cyclic GFR-binding peptide
TRLSPISILYKDSANNVV

SEQ ID NO: 12807 - protein, 22 aa, Artificial Sequence
  Cyclic GFR-binding peptide
  MOD_RES (6)..(7): Xaa is C or S
HVPKPXXAPTKLSPISVLYKDD

SEQ ID NO: 12808 - protein, 16 aa, Artificial Sequence
  Cyclic GFR-binding peptide
  MOD_RES (2)..(3): Xaa is C or S
PXXTPTKMSPISMLYK

SEQ ID NO: 12809 - protein, 14 aa, Artificial Sequence
  Cyclic GFR-binding peptide
  MOD_RES (1)..(1): Xaa is C or S
XVPTRLSATSILYY

SEQ ID NO: 12810 - protein, 13 aa, Artificial Sequence
  Cyclic GFR-binding peptide
APVKTSATSMLYY

SEQ ID NO: 12811 - protein, 22 aa, Artificial Sequence
  Cyclic GFR-binding peptide
  MOD_RES (6)..(7): Xaa is C or S
RVPSTXXAPVKTSPISMLYKDN

SEQ ID NO: 12812 - protein, 14 aa, Artificial Sequence
  Cyclic GFR-binding peptide
  MOD_RES (1)..(1): Xaa is C or S
XTPTKMEPISMLYL

SEQ ID NO: 12813 - protein, 17 aa, Artificial Sequence
  Cyclic GFR-binding peptide
KLSATSILYYDKGVVTY

SEQ ID NO: 12814 - protein, 18 aa, Artificial Sequence
  Cyclic GFR-binding peptide
  MOD_RES (4)..(5): Xaa is C or S
SKAXXVPTKLSATSILYY

SEQ ID NO: 12815 - protein, 15 aa, Artificial Sequence
  Cyclic GFR-binding peptide
SPISMLYKDNGRVLL

SEQ ID NO: 12816 - protein, 22 aa, Artificial Sequence
  Cyclic GFR-binding peptide
  MOD_RES (6)..(7): Xaa is C or S
HVPKPXXAPTKLEPISVLYLDD

SEQ ID NO: 12817 - protein, 15 aa, Artificial Sequence
  Cyclic GFR-binding peptide
  MOD_RES (1)..(2): Xaa is C or S
XXVPTRLSATSILYY

SEQ ID NO: 12818 - protein, 17 aa, Artificial Sequence
  Cyclic GFR-binding peptide
  MOD_RES (3)..(4): Xaa is C or S
EPXXVPEKMNAISILYF

SEQ ID NO: 12819 - protein, 15 aa, Artificial Sequence
  Cyclic GFR-binding peptide
EPISMLYLNDKQQII

SEQ ID NO: 12820 - protein, 14 aa, Artificial Sequence
  Cyclic GFR-binding peptide
  MOD_RES (1)..(1): Xaa is C or S
XAPVKTSATSMLYY

SEQ ID NO: 12821 - protein, 16 aa, Artificial Sequence
  Cyclic GFR-binding peptide
  MOD_RES (2)..(3): Xaa is C or S
TXXAPVKTEPISMLYL

SEQ ID NO: 12822 - protein, 17 aa, Artificial Sequence
  Cyclic GFR-binding peptide
KTEPISMLYLDNGRVLL

SEQ ID NO: 12823 - protein, 15 aa, Artificial Sequence
  Cyclic GFR-binding peptide
  MOD_RES (1)..(2): Xaa is C or S
XXVPQDLSPINILYF

SEQ ID NO: 12824 - protein, 16 aa, Artificial Sequence
  Cyclic GFR-binding peptide
MSATSILYYDENKNVV

SEQ ID NO: 12825 - protein, 19 aa, Artificial Sequence
  Cyclic GFR-binding peptide
  MOD_RES (5)..(6): Xaa is C or S
IPEPXXVPEKMSPISILYK

SEQ ID NO: 12826 - protein, 19 aa, Artificial Sequence
  Cyclic GFR-binding peptide
  MOD_RES (5)..(6): Xaa is C or S
TPPTXXVPTRLSATSILYY

SEQ ID NO: 12827 - protein, 21 aa, Artificial Sequence
  Cyclic GFR-binding peptide
  MOD_RES (6)..(7): Xaa is C or S
HVPKPXXAPTKLSATSVLYYD

SEQ ID NO: 12828 - protein, 20 aa, Artificial Sequence
  Cyclic GFR-binding peptide
  MOD_RES (6)..(7): Xaa is C or S
RVPSTXXAPVKTSATSMLYY

SEQ ID NO: 12829 - protein, 18 aa, Artificial Sequence
  Cyclic GFR-binding peptide
  MOD_RES (4)..(5): Xaa is C or S
PEPXXVPEKMEPISILYL

SEQ ID NO: 12830 - protein, 18 aa, Artificial Sequence
  Cyclic GFR-binding peptide
VKTSPISMLYKDNGRVLL

SEQ ID NO: 12831 - protein, 16 aa, Artificial Sequence
  Cyclic GFR-binding peptide
  MOD_RES (2)..(3): Xaa is C or S
PXXTPTKMSATSMLYY

SEQ ID NO: 12832 - protein, 25 aa, Artificial Sequence
  Cyclic GFR-binding peptide
  MOD_RES (6)..(7): Xaa is C or S
GIPEPXXVPEKMSPINILYFDENKN

SEQ ID NO: 12833 - protein, 16 aa, Artificial Sequence
  Cyclic GFR-binding peptide
  MOD_RES (2)..(3): Xaa is C or S
TXXVPTRLEPISILYL

SEQ ID NO: 12834 - protein, 13 aa, Artificial Sequence
  Cyclic GFR-binding peptide
VPQDLSPINILYF

SEQ ID NO: 12835 - protein, 21 aa, Artificial Sequence
  Cyclic GFR-binding peptide
  MOD_RES (6)..(7): Xaa is C or S
HVPKPXXAPTKLSPISVLYKD

SEQ ID NO: 12836 - protein, 21 aa, Artificial Sequence
  Cyclic GFR-binding peptide
  MOD_RES (6)..(7): Xaa is C or S
ASAAPXXVPQALSPINILYFV

SEQ ID NO: 12837 - protein, 15 aa, Artificial Sequence
  Cyclic GFR-binding peptide
EPISILYLDENKNVV

SEQ ID NO: 12838 - protein, 14 aa, Artificial Sequence
  Cyclic GFR-binding peptide
  MOD_RES (1)..(1): Xaa is C or S
XVPTRLSPISILYK

SEQ ID NO: 12839 - protein, 15 aa, Artificial Sequence
  Cyclic GFR-binding peptide
  MOD_RES (1)..(2): Xaa is C or S
XXVPEKMEPISILYL

SEQ ID NO: 12840 - protein, 16 aa, Artificial Sequence
  Cyclic GFR-binding peptide
  MOD_RES (2)..(3): Xaa is C or S
TXXVPTRLSATSILYY

SEQ ID NO: 12841 - protein, 25 aa, Artificial Sequence
  Cyclic GFR-binding peptide
  MOD_RES (6)..(7): Xaa is C or S
STPPTXXVPTRLEPISILYLDSANN

SEQ ID NO: 12842 - protein, 18 aa, Artificial Sequence
  Cyclic GFR-binding peptide
TKMSPISMLYKNDKQQII

SEQ ID NO: 12843 - protein, 27 aa, Artificial Sequence
  Cyclic GFR-binding peptide
  MOD_RES (6)..(7): Xaa is C or S
KASKAXXVPTKLSATSILYYDKGVVTY

SEQ ID NO: 12844 - protein, 19 aa, Artificial Sequence
  Cyclic GFR-binding peptide
PARLSATSILYYDAANNVV

SEQ ID NO: 12845 - protein, 24 aa, Artificial Sequence
  Cyclic GFR-binding peptide
  MOD_RES (6)..(7): Xaa is C or S
GIPEPXXVPEKMNAISILYFDENK

SEQ ID NO: 12846 - protein, 13 aa, Artificial Sequence
  Cyclic GFR-binding peptide
TPTKMSATSMLYY

SEQ ID NO: 12847 - protein, 20 aa, Artificial Sequence
  Cyclic GFR-binding peptide
  MOD_RES (6)..(7): Xaa is C or S
STPPTXXVPTRLEPISILYL

SEQ ID NO: 12848 - protein, 17 aa, Artificial Sequence
  Cyclic GFR-binding peptide
  MOD_RES (3)..(4): Xaa is C or S
GPXXTPTKMEPISMLYL

SEQ ID NO: 12849 - protein, 18 aa, Artificial Sequence
  Cyclic GFR-binding peptide
  MOD_RES (4)..(5): Xaa is C or S
AGPXXTPTKMSATSMLYY

SEQ ID NO: 12850 - protein, 19 aa, Artificial Sequence
  Cyclic GFR-binding peptide
  MOD_RES (5)..(6): Xaa is C or S
VPSTXXAPVKTSPISMLYK

SEQ ID NO: 12851 - protein, 26 aa, Artificial Sequence
  Cyclic GFR-binding peptide
  MOD_RES (6)..(7): Xaa is C or S
GSAGPXXTPTKMSPISMLYKNDKQQI

SEQ ID NO: 12852 - protein, 23 aa, Artificial Sequence
  Cyclic GFR-binding peptide
  MOD_RES (6)..(7): Xaa is C or S
GIPEPXXVPEKMEPISILYLDEN

SEQ ID NO: 12853 - protein, 16 aa, Artificial Sequence
  Cyclic GFR-binding peptide
  MOD_RES (2)..(3): Xaa is C or S
SXXVPARLSATSILYY

SEQ ID NO: 12854 - protein, 20 aa, Artificial Sequence
  Cyclic GFR-binding peptide
  MOD_RES (6)..(7): Xaa is C or S
HVPKPXXAPTKLEPISVLYL

SEQ ID NO: 12855 - protein, 27 aa, Artificial Sequence
  Cyclic GFR-binding peptide
  MOD_RES (6)..(7): Xaa is C or S
GIPEPXXVPEKMNAISILYFDENKNVV

SEQ ID NO: 12856 - protein, 22 aa, Artificial Sequence
  Cyclic GFR-binding peptide
  MOD_RES (6)..(7): Xaa is C or S
GSAGPXXTPTKMSATSMLYYND

SEQ ID NO: 12857 - protein, 27 aa, Artificial Sequence
  Cyclic GFR-binding peptide
  MOD_RES (6)..(7): Xaa is C or S
AAPASXXVPARLSATSILYYDAANNVV

SEQ ID NO: 12858 - protein, 13 aa, Artificial Sequence
  Cyclic GFR-binding peptide
VPEKMSPINILYF

SEQ ID NO: 12859 - protein, 26 aa, Artificial Sequence
  Cyclic GFR-binding peptide
  MOD_RES (6)..(7): Xaa is C or S
KASKAXXVPTKLSATSILYYDKGVVT

SEQ ID NO: 12860 - protein, 15 aa, Artificial Sequence
  Cyclic GFR-binding peptide
EPISMLYLDNGRVLL

SEQ ID NO: 12861 - protein, 24 aa, Artificial Sequence
  Cyclic GFR-binding peptide
  MOD_RES (6)..(7): Xaa is C or S
ASAAPXXVPQALSPINILYFVGRK

SEQ ID NO: 12862 - protein, 14 aa, Artificial Sequence
  Cyclic GFR-binding peptide
  MOD_RES (1)..(1): Xaa is C or S
XVPEKMEPISILYL

SEQ ID NO: 12863 - protein, 21 aa, Artificial Sequence
  Cyclic GFR-binding peptide
  MOD_RES (6)..(7): Xaa is C or S
GSAGPXXTPTKMSPISMLYKN

SEQ ID NO: 12864 - protein, 17 aa, Artificial Sequence
  Cyclic GFR-binding peptide
DLSPINILYFVGRTPKV

SEQ ID NO: 12865 - protein, 19 aa, Artificial Sequence
  Cyclic GFR-binding peptide
PTKMSATSMLYYNDKQQII

SEQ ID NO: 12866 - protein, 25 aa, Artificial Sequence
  Cyclic GFR-binding peptide
  MOD_RES (6)..(7): Xaa is C or S
ASASPXXVPQDLSPINILYFVGRTP

SEQ ID NO: 12867 - protein, 18 aa, Artificial Sequence
  Cyclic GFR-binding peptide
EKMSATSILYYDENKNVV

SEQ ID NO: 12868 - protein, 27 aa, Artificial Sequence
  Cyclic GFR-binding peptide
  MOD_RES (6)..(7): Xaa is C or S
GIPEPXXVPEKMSPINILYFDENKNVV

SEQ ID NO: 12869 - protein, 25 aa, Artificial Sequence
  Cyclic GFR-binding peptide
  MOD_RES (6)..(7): Xaa is C or S
KASKAXXVPTKLSATSILYYDKGVV

SEQ ID NO: 12870 - protein, 15 aa, Artificial Sequence
  Cyclic GFR-binding peptide
  MOD_RES (1)..(2): Xaa is C or S
XXVPEKMSATSILYY

SEQ ID NO: 12871 - protein, 19 aa, Artificial Sequence
  Cyclic GFR-binding peptide
PQDLSPINILYFVGRTPKV

SEQ ID NO: 12872 - protein, 23 aa, Artificial Sequence
  Cyclic GFR-binding peptide
  MOD_RES (6)..(7): Xaa is C or S
GIPEPXXVPEKMNAISILYFDEN

SEQ ID NO: 12873 - protein, 19 aa, Artificial Sequence
  Cyclic GFR-binding peptide
  MOD_RES (5)..(6): Xaa is C or S
TPPTXXVPTRLEPISILYL

SEQ ID NO: 12874 - protein, 18 aa, Artificial Sequence
  Cyclic GFR-binding peptide
  MOD_RES (4)..(5): Xaa is C or S
AGPXXTPTKMSPISMLYK

SEQ ID NO: 12875 - protein, 14 aa, Artificial Sequence
  Cyclic GFR-binding peptide
  MOD_RES (1)..(1): Xaa is C or S
XAPVKTEPISMLYL

SEQ ID NO: 12876 - protein, 18 aa, Artificial Sequence
  Cyclic GFR-binding peptide
  MOD_RES (4)..(5): Xaa is C or S
PPTXXVPTRLEPISILYL

SEQ ID NO: 12877 - protein, 21 aa, Artificial Sequence
  Cyclic GFR-binding peptide
  MOD_RES (6)..(7): Xaa is C or S
GIPEPXXVPEKMSPINILYFD

SEQ ID NO: 12878 - protein, 15 aa, Artificial Sequence
  Cyclic GFR-binding peptide
  MOD_RES (1)..(2): Xaa is C or S
XXAPVKTEPISMLYL

SEQ ID NO: 12879 - protein, 16 aa, Artificial Sequence
  Cyclic GFR-binding peptide
  MOD_RES (2)..(3): Xaa is C or S
PXXVPEKMSATSILYY

SEQ ID NO: 12880 - protein, 19 aa, Artificial Sequence
  Cyclic GFR-binding peptide
PTRLSATSILYYDSANNVV

SEQ ID NO: 12881 - protein, 27 aa, Artificial Sequence
  Cyclic GFR-binding peptide
  MOD_RES (6)..(7): Xaa is C or S
STPPTXXVPTRLSATSILYYDSANNVV

SEQ ID NO: 12882 - protein, 15 aa, Artificial Sequence
  Cyclic GFR-binding peptide
SATSILYYDKGVVTY

SEQ ID NO: 12883 - protein, 26 aa, Artificial Sequence
  Cyclic GFR-binding peptide
  MOD_RES (6)..(7): Xaa is C or S
STPPTXXVPTRLSPISILYKDSANNV

SEQ ID NO: 12884 - protein, 17 aa, Artificial Sequence
  Cyclic GFR-binding peptide
KMEPISILYLDENKNVV

SEQ ID NO: 12885 - protein, 21 aa, Artificial Sequence
  Cyclic GFR-binding peptide
  MOD_RES (6)..(7): Xaa is C or S
GIPEPXXVPEKMSATSILYYD

SEQ ID NO: 12886 - protein, 13 aa, Artificial Sequence
  Cyclic GFR-binding peptide
VPTRLEPISILYL

SEQ ID NO: 12887 - protein, 23 aa, Artificial Sequence
  Cyclic GFR-binding peptide
  MOD_RES (6)..(7): Xaa is C or S
GIPEPXXVPEKMSPINILYFDEN

SEQ ID NO: 12888 - protein, 16 aa, Artificial Sequence
  Cyclic GFR-binding peptide
LSATSILYYDAANNVV

SEQ ID NO: 12889 - protein, 26 aa, Artificial Sequence
  Cyclic GFR-binding peptide
  MOD_RES (6)..(7): Xaa is C or S
RVPSTXXAPVKTSPISMLYKDNGRVL

SEQ ID NO: 12890 - protein, 18 aa, Artificial Sequence
  Cyclic GFR-binding peptide
  MOD_RES (4)..(5): Xaa is C or S
PEPXXVPEKMSATSILYY

SEQ ID NO: 12891 - protein, 17 aa, Artificial Sequence
  Cyclic GFR-binding peptide
  MOD_RES (3)..(4): Xaa is C or S
STXXAPVKTEPISMLYL

SEQ ID NO: 12892 - protein, 21 aa, Artificial Sequence
  Cyclic GFR-binding peptide
  MOD_RES (6)..(7): Xaa is C or S
STPPTXXVPTRLSPISILYKD

SEQ ID NO: 12893 - protein, 15 aa, Artificial Sequence
  Cyclic GFR-binding peptide
  MOD_RES (1)..(2): Xaa is C or S
XXAPVKTSPISMLYK

SEQ ID NO: 12894 - protein, 22 aa, Artificial Sequence
  Cyclic GFR-binding peptide
  MOD_RES (6)..(7): Xaa is C or S
HVPKPXXAPTKLSATSVLYYDD

SEQ ID NO: 12895 - protein, 14 aa, Artificial Sequence
  Cyclic GFR-binding peptide
  MOD_RES (1)..(1): Xaa is C or S
XVPTRLEPISILYL

SEQ ID NO: 12896 - protein, 15 aa, Artificial Sequence
  Cyclic GFR-binding peptide
  MOD_RES (1)..(2): Xaa is C or S
XXVPEKMNAISILYF

SEQ ID NO: 12897 - protein, 14 aa, Artificial Sequence
  Cyclic GFR-binding peptide
  MOD_RES (1)..(1): Xaa is C or S
XAPVKTSPISMLYK

SEQ ID NO: 12898 - protein, 20 aa, Artificial Sequence
  Cyclic GFR-binding peptide
  MOD_RES (6)..(7): Xaa is C or S
ASASPXXVSQDLSPINILYF

SEQ ID NO: 12899 - protein, 26 aa, Artificial Sequence
  Cyclic GFR-binding peptide
  MOD_RES (6)..(7): Xaa is C or S
GIPEPXXVPEKMNAISILYFDENKNV

SEQ ID NO: 12900 - protein, 16 aa, Artificial Sequence
  Cyclic GFR-binding peptide
  MOD_RES (2)..(3): Xaa is C or S
PXXVPQDLSPINILYF

SEQ ID NO: 12901 - protein, 19 aa, Artificial Sequence
  Cyclic GFR-binding peptide
  MOD_RES (5)..(6): Xaa is C or S
APASXXVPARLSATSILYY

SEQ ID NO: 12902 - protein, 18 aa, Artificial Sequence
  Cyclic GFR-binding peptide
  MOD_RES (4)..(5): Xaa is C or S
AGPXXTPTKMEPISMLYL

SEQ ID NO: 12903 - protein, 13 aa, Artificial Sequence
  Cyclic GFR-binding peptide
VPEKMSPISILYK

SEQ ID NO: 12904 - protein, 16 aa, Artificial Sequence
  Cyclic GFR-binding peptide
MSATSMLYYNDKQQII

SEQ ID NO: 12905 - protein, 15 aa, Artificial Sequence
  Cyclic GFR-binding peptide
  MOD_RES (1)..(2): Xaa is C or S
XXVPEKMSPISILYK

SEQ ID NO: 12906 - protein, 15 aa, Artificial Sequence
  Cyclic GFR-binding peptide
NAISILYFDENKNVV

SEQ ID NO: 12907 - protein, 19 aa, Artificial Sequence
  Cyclic GFR-binding peptide
PEKMEPISILYLDENKNVV

SEQ ID NO: 12908 - protein, 23 aa, Artificial Sequence
  Cyclic GFR-binding peptide
  MOD_RES (6)..(7): Xaa is C or S
GSAGPXXTPTKMEPISMLYLNDK

SEQ ID NO: 12909 - protein, 20 aa, Artificial Sequence
  Cyclic GFR-binding peptide
  MOD_RES (6)..(7): Xaa is C or S
GIPEPXXVPEKMSPINILYF

SEQ ID NO: 12910 - protein, 19 aa, Artificial Sequence
  Cyclic GFR-binding peptide
  MOD_RES (5)..(6): Xaa is C or S
VPSTXXAPVKTEPISMLYL

SEQ ID NO: 12911 - protein, 20 aa, Artificial Sequence
  Cyclic GFR-binding peptide
  MOD_RES (6)..(7): Xaa is C or S
RVPSTXXAPVKTSPISMLYK

SEQ ID NO: 12912 - protein, 24 aa, Artificial Sequence
  Cyclic GFR-binding peptide
  MOD_RES (6)..(7): Xaa is C or S
GIPEPXXVPEKMEPISILYLDENK

SEQ ID NO: 12913 - protein, 26 aa, Artificial Sequence
  Cyclic GFR-binding peptide
  MOD_RES (6)..(7): Xaa is C or S
GIPEPXXVPEKMSPISILYKDENKNV

SEQ ID NO: 12914 - protein, 14 aa, Artificial Sequence
  Cyclic GFR-binding peptide
  MOD_RES (1)..(1): Xaa is C or S
XVPEKMSPISILYK

SEQ ID NO: 12915 - protein, 25 aa, Artificial Sequence
  Cyclic GFR-binding peptide
  MOD_RES (6)..(7): Xaa is C or S
HVPKPXXAPTKLEPISVLYLDDSSN

SEQ ID NO: 12916 - protein, 18 aa, Artificial Sequence
  Cyclic GFR-binding peptide
EKMEPISILYLDENKNVV

SEQ ID NO: 12917 - protein, 18 aa, Artificial Sequence
  Cyclic GFR-binding peptide
  MOD_RES (4)..(5): Xaa is C or S
PEPXXVPEKMNAISILYF

SEQ ID NO: 12918 - protein, 15 aa, Artificial Sequence
  Cyclic GFR-binding peptide
  MOD_RES (1)..(2): Xaa is C or S
XXVPTRLSPISILYK

SEQ ID NO: 12919 - protein, 22 aa, Artificial Sequence
  Cyclic GFR-binding peptide
  MOD_RES (6)..(7): Xaa is C or S
RVPSTXXAPVKTSATSMLYYDN

SEQ ID NO: 12920 - protein, 21 aa, Artificial Sequence
  Cyclic GFR-binding peptide
  MOD_RES (6)..(7): Xaa is C or S
KASKAXXVPTKLSATSILYYD

SEQ ID NO: 12921 - protein, 25 aa, Artificial Sequence
  Cyclic GFR-binding peptide
  MOD_RES (6)..(7): Xaa is C or S
GSAGPXXTPTKMEPISMLYLNDKQQ

SEQ ID NO: 12922 - protein, 20 aa, Artificial Sequence
  Cyclic GFR-binding peptide
  MOD_RES (6)..(7): Xaa is C or S
GSAGPXXTPTKMSATSMLYY

SEQ ID NO: 12923 - protein, 26 aa, Artificial Sequence
  Cyclic GFR-binding peptide
  MOD_RES (6)..(7): Xaa is C or S
GIPEPXXVPEKMEPISILYLDENKNV

SEQ ID NO: 12924 - protein, 16 aa, Artificial Sequence
  Cyclic GFR-binding peptide
  MOD_RES (2)..(3): Xaa is C or S
PXXVPEKMSPINILYF

SEQ ID NO: 12925 - protein, 27 aa, Artificial Sequence
  Cyclic GFR-binding peptide
  MOD_RES (6)..(7): Xaa is C or S
ASASPXXVSQDLSPINILYFIGKTPKI

SEQ ID NO: 12926 - protein, 15 aa, Artificial Sequence
  Cyclic GFR-binding peptide
SPINILYFDENKNVV

SEQ ID NO: 12927 - protein, 23 aa, Artificial Sequence
  Cyclic GFR-binding peptide
  MOD_RES (6)..(7): Xaa is C or S
RVPSTXXAPVKTEPISMLYLDNG

SEQ ID NO: 12928 - protein, 26 aa, Artificial Sequence
  Cyclic GFR-binding peptide
  MOD_RES (6)..(7): Xaa is C or S
HVPKPXXAPTKLSATSVLYYDDSSNV

SEQ ID NO: 12929 - protein, 25 aa, Artificial Sequence
  Cyclic GFR-binding peptide
  MOD_RES (6)..(7): Xaa is C or S
AAPASXXVPARLSATSILYYDAANN

SEQ ID NO: 12930 - protein, 25 aa, Artificial Sequence
  Cyclic GFR-binding peptide
  MOD_RES (6)..(7): Xaa is C or S
GSAGPXXTPTKMSPISMLYKNDKQQ

SEQ ID NO: 12931 - protein, 13 aa, Artificial Sequence
  Cyclic GFR-binding peptide
APVKTSPISMLYK

SEQ ID NO: 12932 - protein, 20 aa, Artificial Sequence
  Cyclic GFR-binding peptide
  MOD_RES (6)..(7): Xaa is C or S
ASAAPXXVPQALSPINILYF

SEQ ID NO: 12933 - protein, 22 aa, Artificial Sequence
  Cyclic GFR-binding peptide
  MOD_RES (6)..(7): Xaa is C or S
AAPASXXVPARLSATSILYYDA

SEQ ID NO: 12934 - protein, 19 aa, Artificial Sequence
  Cyclic GFR-binding peptide
  MOD_RES (5)..(6): Xaa is C or S
SAGPXXTPTKMSPISMLYK

SEQ ID NO: 12935 - protein, 16 aa, Artificial Sequence
  Cyclic GFR-binding peptide
  MOD_RES (2)..(3): Xaa is C or S
PXXVPEKMEPISILYL

SEQ ID NO: 12936 - protein, 26 aa, Artificial Sequence
  Cyclic GFR-binding peptide
  MOD_RES (6)..(7): Xaa is C or S
GSAGPXXTPTKMSATSMLYYNDKQQI

SEQ ID NO: 12937 - protein, 19 aa, Artificial Sequence
  Cyclic GFR-binding peptide
  MOD_RES (5)..(6): Xaa is C or S
IPEPXXVPEKMSPINILYF

SEQ ID NO: 12938 - protein, 24 aa, Artificial Sequence
  Cyclic GFR-binding peptide
  MOD_RES (6)..(7): Xaa is C or S
STPPTXXVPTRLSATSILYYDSAN

SEQ ID NO: 12939 - protein, 20 aa, Artificial Sequence
  Cyclic GFR-binding peptide
  MOD_RES (6)..(7): Xaa is C or S
GSAGPXXTPTKMEPISMLYL

SEQ ID NO: 12940 - protein, 25 aa, Artificial Sequence
  Cyclic GFR-binding peptide
  MOD_RES (6)..(7): Xaa is C or S
RVPSTXXAPVKTSATSMLYYDNGRV

SEQ ID NO: 12941 - protein, 18 aa, Artificial Sequence
  Cyclic GFR-binding peptide
VKTEPISMLYLDNGRVLL

SEQ ID NO: 12942 - protein, 18 aa, Artificial Sequence
  Cyclic GFR-binding peptide
  MOD_RES (4)..(5): Xaa is C or S
ASPXXVPQDLSPINILYF

SEQ ID NO: 12943 - protein, 26 aa, Artificial Sequence
  Cyclic GFR-binding peptide
  MOD_RES (6)..(7): Xaa is C or S
ASASPXXVSQDLSPINILYFIGKTPK

SEQ ID NO: 12944 - protein, 18 aa, Artificial Sequence
  Cyclic GFR-binding peptide
  MOD_RES (4)..(5): Xaa is C or S
PSTXXAPVKTSATSMLYY

SEQ ID NO: 12945 - protein, 13 aa, Artificial Sequence
  Cyclic GFR-binding peptide
VPEKMEPISILYL

SEQ ID NO: 12946 - protein, 18 aa, Artificial Sequence
  Cyclic GFR-binding peptide
ARLSATSILYYDAANNVV

SEQ ID NO: 12947 - protein, 25 aa, Artificial Sequence
  Cyclic GFR-binding peptide
  MOD_RES (6)..(7): Xaa is C or S
RVPSTXXAPVKTSPISMLYKDNGRV

SEQ ID NO: 12948 - protein, 20 aa, Artificial Sequence
  Cyclic GFR-binding peptide
  MOD_RES (6)..(7): Xaa is C or S
HVPKPXXAPTKLSATSVLYY

SEQ ID NO: 12949 - protein, 16 aa, Artificial Sequence
  Cyclic GFR-binding peptide
LSATSILYYDKGVVTY

SEQ ID NO: 12950 - protein, 24 aa, Artificial Sequence
  Cyclic GFR-binding peptide
  MOD_RES (6)..(7): Xaa is C or S
RVPSTXXAPVKTSPISMLYKDNGR

SEQ ID NO: 12951 - protein, 16 aa, Artificial Sequence
  Cyclic GFR-binding peptide
  MOD_RES (2)..(3): Xaa is C or S
AXXVPTKLSATSILYY

SEQ ID NO: 12952 - protein, 19 aa, Artificial Sequence
  Cyclic GFR-binding peptide
  MOD_RES (5)..(6): Xaa is C or S
SAGPXXTPTKMSATSMLYY

SEQ ID NO: 12953 - protein, 26 aa, Artificial Sequence
  Cyclic GFR-binding peptide
  MOD_RES (6)..(7): Xaa is C or S
ASASPXXVPQDLSPINILYFVGRTPK

SEQ ID NO: 12954 - protein, 17 aa, Artificial Sequence
  Cyclic GFR-binding peptide
RLSATSILYYDAANNVV

SEQ ID NO: 12955 - protein, 19 aa, Artificial Sequence
  Cyclic GFR-binding peptide
PTKMSPISMLYKNDKQQII

SEQ ID NO: 12956 - protein, 15 aa, Artificial Sequence
  Cyclic GFR-binding peptide
  MOD_RES (1)..(2): Xaa is C or S
XXVSQDLSPINILYF

SEQ ID NO: 12957 - protein, 24 aa, Artificial Sequence
  Cyclic GFR-binding peptide
  MOD_RES (6)..(7): Xaa is C or S
RVPSTXXAPVKTEPISMLYLDNGR

SEQ ID NO: 12958 - protein, 19 aa, Artificial Sequence
  Cyclic GFR-binding peptide
PTRLSPISILYKDSANNVV

SEQ ID NO: 12959 - protein, 16 aa, Artificial Sequence
  Cyclic GFR-binding peptide
  MOD_RES (2)..(3): Xaa is C or S
PXXVPQALSPINILYF

SEQ ID NO: 12960 - protein, 25 aa, Artificial Sequence
  Cyclic GFR-binding peptide
  MOD_RES (6)..(7): Xaa is C or S
GSAGPXXTPTKMSATSMLYYNDKQQ

SEQ ID NO: 12961 - protein, 18 aa, Artificial Sequence
  Cyclic GFR-binding peptide
TKLSATSILYYDKGVVTY

SEQ ID NO: 12962 - protein, 18 aa, Artificial Sequence
  Cyclic GFR-binding peptide
  MOD_RES (4)..(5): Xaa is C or S
PSTXXAPVKTSPISMLYK

SEQ ID NO: 12963 - protein, 19 aa, Artificial Sequence
  Cyclic GFR-binding peptide
PEKMNAISILYFDENKNVV

SEQ ID NO: 12964 - protein, 20 aa, Artificial Sequence
  Cyclic GFR-binding peptide
  MOD_RES (6)..(7): Xaa is C or S
RVPSTXXAPVKTEPISMLYL

SEQ ID NO: 12965 - protein, 22 aa, Artificial Sequence
  Cyclic GFR-binding peptide
  MOD_RES (6)..(7): Xaa is C or S
STPPTXXVPTRLSATSILYYDS

SEQ ID NO: 12966 - protein, 16 aa, Artificial Sequence
  Cyclic GFR-binding peptide
LSPINILYFIGKTPKI

SEQ ID NO: 12967 - protein, 16 aa, Artificial Sequence
  Cyclic GFR-binding peptide
  MOD_RES (2)..(3): Xaa is C or S
TXXAPVKTSATSMLYY

SEQ ID NO: 12968 - protein, 25 aa, Artificial Sequence
  Cyclic GFR-binding peptide
  MOD_RES (6)..(7): Xaa is C or S
STPPTXXVPTRLSPISILYKDSANN

SEQ ID NO: 12969 - protein, 15 aa, Artificial Sequence
  Cyclic GFR-binding peptide
SATSILYYDSANNVV

SEQ ID NO: 12970 - protein, 16 aa, Artificial Sequence
  Cyclic GFR-binding peptide
MSPISMLYKNDKQQII

SEQ ID NO: 12971 - protein, 21 aa, Artificial Sequence
  Cyclic GFR-binding peptide
  MOD_RES (6)..(7): Xaa is C or S
AAPASXXVPARLSATSILYYD

SEQ ID NO: 12972 - protein, 17 aa, Artificial Sequence
  Cyclic GFR-binding peptide
  MOD_RES (3)..(4): Xaa is C or S
STXXAPVKTSATSMLYY

SEQ ID NO: 12973 - protein, 17 aa, Artificial Sequence
  Cyclic GFR-binding peptide
KMSPINILYFDENKNVV

SEQ ID NO: 12974 - protein, 13 aa, Artificial Sequence
  Cyclic GFR-binding peptide
VPEKMSATSILYY

SEQ ID NO: 12975 - protein, 19 aa, Artificial Sequence
  Cyclic GFR-binding peptide
  MOD_RES (5)..(6): Xaa is C or S
SAGPXXTPTKMEPISMLYL

SEQ ID NO: 12976 - protein, 21 aa, Artificial Sequence
  Cyclic GFR-binding peptide
  MOD_RES (6)..(7): Xaa is C or S
GIPEPXXVPEKMSPISILYKD

SEQ ID NO: 12977 - protein, 27 aa, Artificial Sequence
  Cyclic GFR-binding peptide
  MOD_RES (6)..(7): Xaa is C or S
GIPEPXXVPEKMEPISILYLDENKNVV

SEQ ID NO: 12978 - protein, 13 aa, Artificial Sequence
  Cyclic GFR-binding peptide
APVKTEPISMLYL

SEQ ID NO: 12979 - protein, 27 aa, Artificial Sequence
  Cyclic GFR-binding peptide
  MOD_RES (6)..(7): Xaa is C or S
GSAGPXXTPTKMEPISMLYLNDKQQII

SEQ ID NO: 12980 - protein, 16 aa, Artificial Sequence
  Cyclic GFR-binding peptide
  MOD_RES (2)..(3): Xaa is C or S
TXXAPVKTSPISMLYK

SEQ ID NO: 12981 - protein, 25 aa, Artificial Sequence
  Cyclic GFR-binding peptide
  MOD_RES (6)..(7): Xaa is C or S
STPPTXXVPTRLSATSILYYDSANN

SEQ ID NO: 12982 - protein, 16 aa, Artificial Sequence
  Cyclic GFR-binding peptide
LSPINILYFVGRKPKV

SEQ ID NO: 12983 - protein, 13 aa, Artificial Sequence
  Cyclic GFR-binding peptide
VPTKLSATSILYY

SEQ ID NO: 12984 - protein, 17 aa, Artificial Sequence
  Cyclic GFR-binding peptide
  MOD_RES (3)..(4): Xaa is C or S
STXXAPVKTSPISMLYK

SEQ ID NO: 12985 - protein, 15 aa, Artificial Sequence
  Cyclic GFR-binding peptide
  MOD_RES (1)..(2): Xaa is C or S
XXVPTRLEPISILYL

SEQ ID NO: 12986 - protein, 17 aa, Artificial Sequence
  Cyclic GFR-binding peptide
KMNAISILYFDENKNVV

SEQ ID NO: 12987 - protein, 18 aa, Artificial Sequence
  Cyclic GFR-binding peptide
EKMSPINILYFDENKNVV

SEQ ID NO: 12988 - protein, 19 aa, Artificial Sequence
  Cyclic GFR-binding peptide
PTKLSATSILYYDKGVVTY

SEQ ID NO: 12989 - protein, 20 aa, Artificial Sequence
  Cyclic GFR-binding peptide
  MOD_RES (6)..(7): Xaa is C or S
GSAGPXXTPTKMSPISMLYK

SEQ ID NO: 12990 - protein, 23 aa, Artificial Sequence
  Cyclic GFR-binding peptide
  MOD_RES (6)..(7): Xaa is C or S
STPPTXXVPTRLSATSILYYDSA

SEQ ID NO: 12991 - protein, 26 aa, Artificial Sequence
  Cyclic GFR-binding peptide
  MOD_RES (6)..(7): Xaa is C or S
STPPTXXVPTRLSATSILYYDSANNV

SEQ ID NO: 12992 - protein, 27 aa, Artificial Sequence
  Cyclic GFR-binding peptide
  MOD_RES (6)..(7): Xaa is C or S
ASASPXXVPQDLSPINILYFVGRTPKV

SEQ ID NO: 12993 - protein, 26 aa, Artificial Sequence
  Cyclic GFR-binding peptide
  MOD_RES (6)..(7): Xaa is C or S
GSAGPXXTPTKMEPISMLYLNDKQQI

SEQ ID NO: 12994 - protein, 18 aa, Artificial Sequence
  Cyclic GFR-binding peptide
TRLSATSILYYDSANNVV

SEQ ID NO: 12995 - protein, 16 aa, Artificial Sequence
  Cyclic GFR-binding peptide
MSPINILYFDENKNVV

SEQ ID NO: 12996 - protein, 22 aa, Artificial Sequence
  Cyclic GFR-binding peptide
  MOD_RES (6)..(7): Xaa is C or S
STPPTXXVPTRLSPISILYKDS

SEQ ID NO: 12997 - protein, 15 aa, Artificial Sequence
  Cyclic GFR-binding peptide
  MOD_RES (1)..(2): Xaa is C or S
XXVPARLSATSILYY

SEQ ID NO: 12998 - protein, 18 aa, Artificial Sequence
  Cyclic GFR-binding peptide
VKTSATSMLYYDNGRVLL

SEQ ID NO: 12999 - protein, 22 aa, Artificial Sequence
  Cyclic GFR-binding peptide
  MOD_RES (6)..(7): Xaa is C or S
STPPTXXVPTRLEPISILYLDS

SEQ ID NO: 13000 - protein, 22 aa, Artificial Sequence
  Cyclic GFR-binding peptide
  MOD_RES (6)..(7): Xaa is C or S
GSAGPXXTPTKMSPISMLYKND

SEQ ID NO: 13001 - protein, 14 aa, Artificial Sequence
  Cyclic GFR-binding peptide
  MOD_RES (1)..(1): Xaa is C or S
XVPARLSATSILYY

SEQ ID NO: 13002 - protein, 16 aa, Artificial Sequence
  Cyclic GFR-binding peptide
LSPINILYFVGRTPKV

SEQ ID NO: 13003 - protein, 23 aa, Artificial Sequence
  Cyclic GFR-binding peptide
  MOD_RES (6)..(7): Xaa is C or S
ASASPXXVSQDLSPINILYFIGK

SEQ ID NO: 13004 - protein, 20 aa, Artificial Sequence
  Cyclic GFR-binding peptide
  MOD_RES (6)..(7): Xaa is C or S
HVPKPXXAPTKLSPISVLYK

SEQ ID NO: 13005 - protein, 25 aa, Artificial Sequence
  Cyclic GFR-binding peptide
  MOD_RES (6)..(7): Xaa is C or S
HVPKPXXAPTKLSATSVLYYDDSSN

SEQ ID NO: 13006 - protein, 23 aa, Artificial Sequence
  Cyclic GFR-binding peptide
  MOD_RES (6)..(7): Xaa is C or S
AAPASXXVPARLSATSILYYDAA

SEQ ID NO: 13007 - protein, 22 aa, Artificial Sequence
  Cyclic GFR-binding peptide
  MOD_RES (6)..(7): Xaa is C or S
GSAGPXXTPTKMEPISMLYLND

SEQ ID NO: 13008 - protein, 15 aa, Artificial Sequence
  Cyclic GFR-binding peptide
SATSMLYYDNGRVLL

SEQ ID NO: 13009 - protein, 18 aa, Artificial Sequence
  Cyclic GFR-binding peptide
TKMSATSMLYYNDKQQII

SEQ ID NO: 13010 - protein, 14 aa, Artificial Sequence
  Cyclic GFR-binding peptide
  MOD_RES (1)..(1): Xaa is C or S
XVPQALSPINILYF

SEQ ID NO: 13011 - protein, 17 aa, Artificial Sequence
  Cyclic GFR-binding peptide
  MOD_RES (3)..(4): Xaa is C or S
PTXXVPTRLSATSILYY

SEQ ID NO: 13012 - protein, 27 aa, Artificial Sequence
  Cyclic GFR-binding peptide
  MOD_RES (6)..(7): Xaa is C or S
RVPSTXXAPVKTEPISMLYLDNGRVLL

SEQ ID NO: 13013 - protein, 22 aa, Artificial Sequence
  Cyclic GFR-binding peptide
  MOD_RES (6)..(7): Xaa is C or S
GIPEPXXVPEKMSPINILYFDE

SEQ ID NO: 13014 - protein, 18 aa, Artificial Sequence
  Cyclic GFR-binding peptide
  MOD_RES (4)..(5): Xaa is C or S
ASPXXVSQDLSPINILYF

SEQ ID NO: 13015 - protein, 18 aa, Artificial Sequence
  Cyclic GFR-binding peptide
  MOD_RES (4)..(5): Xaa is C or S
PPTXXVPTRLSPISILYK

SEQ ID NO: 13016 - protein, 16 aa, Artificial Sequence
  Cyclic GFR-binding peptide
TSPISMLYKDNGRVLL

SEQ ID NO: 13017 - protein, 25 aa, Artificial Sequence
  Cyclic GFR-binding peptide
  MOD_RES (6)..(7): Xaa is C or S
ASAAPXXVPQALSPINILYFVGRKP

SEQ ID NO: 13018 - protein, 27 aa, Artificial Sequence
  Cyclic GFR-binding peptide
  MOD_RES (6)..(7): Xaa is C or S
GSAGPXXTPTKMSATSMLYYNDKQQII

SEQ ID NO: 13019 - protein, 16 aa, Artificial Sequence
  Cyclic GFR-binding peptide
  MOD_RES (2)..(3): Xaa is C or S
PXXVPEKMNAISILYF

SEQ ID NO: 13020 - protein, 27 aa, Artificial Sequence
  Cyclic GFR-binding peptide
  MOD_RES (6)..(7): Xaa is C or S
HVPKPXXAPTKLEPISVLYLDDSSNVI

SEQ ID NO: 13021 - protein, 20 aa, Artificial Sequence
  Cyclic GFR-binding peptide
  MOD_RES (6)..(7): Xaa is C or S
STPPTXXVPTRLSPISILYK

SEQ ID NO: 13022 - protein, 22 aa, Artificial Sequence
  Cyclic GFR-binding peptide
  MOD_RES (6)..(7): Xaa is C or S
GIPEPXXVPEKMSPISILYKDE

SEQ ID NO: 13023 - protein, 15 aa, Artificial Sequence
  Cyclic GFR-binding peptide
SPINILYFVGRKPKV

SEQ ID NO: 13024 - protein, 14 aa, Artificial Sequence
  Cyclic GFR-binding peptide
  MOD_RES (1)..(1): Xaa is C or S
XVSQDLSPINILYF

SEQ ID NO: 13025 - protein, 27 aa, Artificial Sequence
  Cyclic GFR-binding peptide
  MOD_RES (6)..(7): Xaa is C or S
GIPEPXXVPEKMSATSILYYDENKNVV

SEQ ID NO: 13026 - protein, 23 aa, Artificial Sequence
  Cyclic GFR-binding peptide
  MOD_RES (6)..(7): Xaa is C or S
STPPTXXVPTRLEPISILYLDSA

SEQ ID NO: 13027 - protein, 21 aa, Artificial Sequence
  Cyclic GFR-binding peptide
  MOD_RES (6)..(7): Xaa is C or S
RVPSTXXAPVKTEPISMLYLD

SEQ ID NO: 13028 - protein, 17 aa, Artificial Sequence
  Cyclic GFR-binding peptide
KMSATSILYYDENKNVV

SEQ ID NO: 13029 - protein, 16 aa, Artificial Sequence
  Cyclic GFR-binding peptide
TEPISMLYLDNGRVLL

SEQ ID NO: 13030 - protein, 22 aa, Artificial Sequence
  Cyclic GFR-binding peptide
  MOD_RES (6)..(7): Xaa is C or S
GIPEPXXVPEKMEPISILYLDE

SEQ ID NO: 13031 - protein, 17 aa, Artificial Sequence
  Cyclic GFR-binding peptide
  MOD_RES (3)..(4): Xaa is C or S
ASXXVPARLSATSILYY

SEQ ID NO: 13032 - protein, 22 aa, Artificial Sequence
  Cyclic GFR-binding peptide
  MOD_RES (6)..(7): Xaa is C or S
ASAAPXXVPQALSPINILYFVG

SEQ ID NO: 13033 - protein, 21 aa, Artificial Sequence
  Cyclic GFR-binding peptide
  MOD_RES (6)..(7): Xaa is C or S
STPPTXXVPTRLSATSILYYD

SEQ ID NO: 13034 - protein, 27 aa, Artificial Sequence
  Cyclic GFR-binding peptide
  MOD_RES (6)..(7): Xaa is C or S
STPPTXXVPTRLEPISILYLDSANNVV

SEQ ID NO: 13035 - protein, 19 aa, Artificial Sequence
  Cyclic GFR-binding peptide
  MOD_RES (5)..(6): Xaa is C or S
SASPXXVSQDLSPINILYF

SEQ ID NO: 13036 - protein, 21 aa, Artificial Sequence
  Cyclic GFR-binding peptide
  MOD_RES (6)..(7): Xaa is C or S
STPPTXXVPTRLEPISILYLD

SEQ ID NO: 13037 - protein, 26 aa, Artificial Sequence
  Cyclic GFR-binding peptide
  MOD_RES (6)..(7): Xaa is C or S
STPPTXXVPTRLEPISILYLDSANNV

SEQ ID NO: 13038 - protein, 18 aa, Artificial Sequence
  Cyclic GFR-binding peptide
EKMNAISILYFDENKNVV

SEQ ID NO: 13039 - protein, 20 aa, Artificial Sequence
  Cyclic GFR-binding peptide
  MOD_RES (6)..(7): Xaa is C or S
GIPEPXXVPEKMNAISILYF

SEQ ID NO: 13040 - protein, 17 aa, Artificial Sequence
  Cyclic GFR-binding peptide
  MOD_RES (3)..(4): Xaa is C or S
EPXXVPEKMSPISILYK

SEQ ID NO: 13041 - protein, 19 aa, Artificial Sequence
  Cyclic GFR-binding peptide
PEKMSATSILYYDENKNVV

SEQ ID NO: 13042 - protein, 13 aa, Artificial Sequence
  Cyclic GFR-binding peptide
VPQALSPINILYF

SEQ ID NO: 13043 - protein, 16 aa, Artificial Sequence
  Cyclic GFR-binding peptide
LEPISILYLDSANNVV

SEQ ID NO: 13044 - protein, 15 aa, Artificial Sequence
  Cyclic GFR-binding peptide
SPINILYFIGKTPKI

SEQ ID NO: 13045 - protein, 16 aa, Artificial Sequence
  Cyclic GFR-binding peptide
MSPISILYKDENKNVV

SEQ ID NO: 13046 - protein, 21 aa, Artificial Sequence
  Cyclic GFR-binding peptide
  MOD_RES (6)..(7): Xaa is C or S
RVPSTXXAPVKTSATSMLYYD

SEQ ID NO: 13047 - protein, 18 aa, Artificial Sequence
  Cyclic GFR-binding peptide
QDLSPINILYFIGKTPKI

SEQ ID NO: 13048 - protein, 26 aa, Artificial Sequence
  Cyclic GFR-binding peptide
  MOD_RES (6)..(7): Xaa is C or S
HVPKPXXAPTKLEPISVLYLDDSSNV

SEQ ID NO: 13049 - protein, 26 aa, Artificial Sequence
  Cyclic GFR-binding peptide
  MOD_RES (6)..(7): Xaa is C or S
AAPASXXVPARLSATSILYYDAANNV

SEQ ID NO: 13050 - protein, 17 aa, Artificial Sequence
  Cyclic GFR-binding peptide
  MOD_RES (3)..(4): Xaa is C or S
PTXXVPTRLEPISILYL

SEQ ID NO: 13051 - protein, 13 aa, Artificial Sequence
  Cyclic GFR-binding peptide
TPTKMSPISMLYK

SEQ ID NO: 13052 - protein, 25 aa, Artificial Sequence
  Cyclic GFR-binding peptide
  MOD_RES (6)..(7): Xaa is C or S
ASASPXXVSQDLSPINILYFIGKTP

SEQ ID NO: 13053 - protein, 26 aa, Artificial Sequence
  Cyclic GFR-binding peptide
  MOD_RES (6)..(7): Xaa is C or S
GIPEPXXVPEKMSPINILYFDENKNV

SEQ ID NO: 13054 - protein, 13 aa, Artificial Sequence
  Cyclic GFR-binding peptide
VSQDLSPINILYF

SEQ ID NO: 13055 - protein, 19 aa, Artificial Sequence
  Cyclic GFR-binding peptide
PVKTEPISMLYLDNGRVLL

SEQ ID NO: 13056 - protein, 22 aa, Artificial Sequence
  Cyclic GFR-binding peptide
  MOD_RES (6)..(7): Xaa is C or S
KASKAXXVPTKLSATSILYYDK

SEQ ID NO: 13057 - protein, 22 aa, Artificial Sequence
  Cyclic GFR-binding peptide
  MOD_RES (6)..(7): Xaa is C or S
GIPEPXXVPEKMNAISILYFDE

SEQ ID NO: 13058 - protein, 27 aa, Artificial Sequence
  Cyclic GFR-binding peptide
  MOD_RES (6)..(7): Xaa is C or S
RVPSTXXAPVKTSPISMLYKDNGRVLL

SEQ ID NO: 13059 - protein, 26 aa, Artificial Sequence
  Cyclic GFR-binding peptide
  MOD_RES (6)..(7): Xaa is C or S
RVPSTXXAPVKTEPISMLYLDNGRVL

SEQ ID NO: 13060 - protein, 19 aa, Artificial Sequence
  Cyclic GFR-binding peptide
  MOD_RES (5)..(6): Xaa is C or S
IPEPXXVPEKMNAISILYF

SEQ ID NO: 13061 - protein, 19 aa, Artificial Sequence
  Cyclic GFR-binding peptide
SQDLSPINILYFIGKTPKI

SEQ ID NO: 13062 - protein, 18 aa, Artificial Sequence
  Cyclic GFR-binding peptide
  MOD_RES (4)..(5): Xaa is C or S
PEPXXVPEKMSPISILYK

SEQ ID NO: 13063 - protein, 14 aa, Artificial Sequence
  Cyclic GFR-binding peptide
  MOD_RES (1)..(1): Xaa is C or S
XVPTKLSATSILYY

SEQ ID NO: 13064 - protein, 25 aa, Artificial Sequence
  Cyclic GFR-binding peptide
  MOD_RES (6)..(7): Xaa is C or S
RVPSTXXAPVKTEPISMLYLDNGRV

SEQ ID NO: 13065 - protein, 27 aa, Artificial Sequence
  Cyclic GFR-binding peptide
  MOD_RES (6)..(7): Xaa is C or S
HVPKPXXAPTKLSPISVLYKDDSSNVI

SEQ ID NO: 13066 - protein, 17 aa, Artificial Sequence
  Cyclic GFR-binding peptide
  MOD_RES (3)..(4): Xaa is C or S
EPXXVPEKMSATSILYY

SEQ ID NO: 13067 - protein, 14 aa, Artificial Sequence
  Cyclic GFR-binding peptide
  MOD_RES (1)..(1): Xaa is C or S
XVPEKMNAISILYF

SEQ ID NO: 13068 - protein, 17 aa, Artificial Sequence
  Cyclic GFR-binding peptide
  MOD_RES (3)..(4): Xaa is C or S
KAXXVPTKLSATSILYY

SEQ ID NO: 13069 - protein, 13 aa, Artificial Sequence
  Cyclic GFR-binding peptide
VPARLSATSILYY

SEQ ID NO: 13070 - protein, 23 aa, Artificial Sequence
  Cyclic GFR-binding peptide
  MOD_RES (6)..(7): Xaa is C or S
ASASPXXVPQDLSPINILYFVGR

SEQ ID NO: 13071 - protein, 19 aa, Artificial Sequence
  Cyclic GFR-binding peptide
  MOD_RES (5)..(6): Xaa is C or S
IPEPXXVPEKMEPISILYL

SEQ ID NO: 13072 - protein, 24 aa, Artificial Sequence
  Cyclic GFR-binding peptide
  MOD_RES (6)..(7): Xaa is C or S
GIPEPXXVPEKMSPISILYKDENK

SEQ ID NO: 13073 - protein, 16 aa, Artificial Sequence
  Cyclic GFR-binding peptide
  MOD_RES (2)..(3): Xaa is C or S
TXXVPTRLSPISILYK

SEQ ID NO: 13074 - protein, 16 aa, Artificial Sequence
  Cyclic GFR-binding peptide
MNAISILYFDENKNVV

SEQ ID NO: 13075 - protein, 23 aa, Artificial Sequence
  Cyclic GFR-binding peptide
  MOD_RES (6)..(7): Xaa is C or S
HVPKPXXAPTKLSATSVLYYDDS

SEQ ID NO: 13076 - protein, 24 aa, Artificial Sequence
  Cyclic GFR-binding peptide
  MOD_RES (6)..(7): Xaa is C or S
STPPTXXVPTRLSPISILYKDSAN

SEQ ID NO: 13077 - protein, 24 aa, Artificial Sequence
  Cyclic GFR-binding peptide
  MOD_RES (6)..(7): Xaa is C or S
ASASPXXVPQDLSPINILYFVGRT

SEQ ID NO: 13078 - protein, 15 aa, Artificial Sequence
  Cyclic GFR-binding peptide
  MOD_RES (1)..(2): Xaa is C or S
XXVPTKLSATSILYY

SEQ ID NO: 13079 - protein, 25 aa, Artificial Sequence
  Cyclic GFR-binding peptide
  MOD_RES (6)..(7): Xaa is C or S
GIPEPXXVPEKMNAISILYFDENKN

SEQ ID NO: 13080 - protein, 17 aa, Artificial Sequence
  Cyclic GFR-binding peptide
KTSATSMLYYDNGRVLL

SEQ ID NO: 13081 - protein, 16 aa, Artificial Sequence
  Cyclic GFR-binding peptide
  MOD_RES (2)..(3): Xaa is C or S
PXXTPTKMEPISMLYL

SEQ ID NO: 13082 - protein, 20 aa, Artificial Sequence
  Cyclic GFR-binding peptide
  MOD_RES (6)..(7): Xaa is C or S
KASKAXXVPTKLSATSILYY

SEQ ID NO: 13083 - protein, 24 aa, Artificial Sequence
  Cyclic GFR-binding peptide
  MOD_RES (6)..(7): Xaa is C or S
KASKAXXVPTKLSATSILYYDKGV

SEQ ID NO: 13084 - protein, 23 aa, Artificial Sequence
  Cyclic GFR-binding peptide
  MOD_RES (6)..(7): Xaa is C or S
HVPKPXXAPTKLSPISVLYKDDS

SEQ ID NO: 13085 - protein, 19 aa, Artificial Sequence
  Cyclic GFR-binding peptide
  MOD_RES (5)..(6): Xaa is C or S
IPEPXXVPEKMSATSILYY

SEQ ID NO: 13086 - protein, 18 aa, Artificial Sequence
  Cyclic GFR-binding peptide
  MOD_RES (4)..(5): Xaa is C or S
PPTXXVPTRLSATSILYY

SEQ ID NO: 13087 - protein, 22 aa, Artificial Sequence
  Cyclic GFR-binding peptide
  MOD_RES (6)..(7): Xaa is C or S
GIPEPXXVPEKMSATSILYYDE

SEQ ID NO: 13088 - protein, 17 aa, Artificial Sequence
  Cyclic GFR-binding peptide
DLSPINILYFIGKTPKI

SEQ ID NO: 13089 - protein, 17 aa, Artificial Sequence
  Cyclic GFR-binding peptide
  MOD_RES (3)..(4): Xaa is C or S
EPXXVPEKMEPISILYL

SEQ ID NO: 13090 - protein, 26 aa, Artificial Sequence
  Cyclic GFR-binding peptide
  MOD_RES (6)..(7): Xaa is C or S
HVPKPXXAPTKLSPISVLYKDDSSNV

SEQ ID NO: 13091 - protein, 19 aa, Artificial Sequence
  Cyclic GFR-binding peptide
PQALSPINILYFVGRKPKV

SEQ ID NO: 13092 - protein, 26 aa, Artificial Sequence
  Cyclic GFR-binding peptide
  MOD_RES (6)..(7): Xaa is C or S
ASAAPXXVPQALSPINILYFVGRKPK

SEQ ID NO: 13093 - protein, 17 aa, Artificial Sequence
  Cyclic GFR-binding peptide
KMSPISMLYKNDKQQII

SEQ ID NO: 13094 - protein, 17 aa, Artificial Sequence
  Cyclic GFR-binding peptide
RLEPISILYLDSANNVV

SEQ ID NO: 13095 - protein, 18 aa, Artificial Sequence
  Cyclic GFR-binding peptide
QDLSPINILYFVGRTPKV

SEQ ID NO: 13096 - protein, 17 aa, Artificial Sequence
  Cyclic GFR-binding peptide
  MOD_RES (3)..(4): Xaa is C or S
GPXXTPTKMSPISMLYK

SEQ ID NO: 13097 - protein, 20 aa, Artificial Sequence
  Cyclic GFR-binding peptide
  MOD_RES (6)..(7): Xaa is C or S
GIPEPXXVPEKMEPISILYL

SEQ ID NO: 13098 - protein, 19 aa, Artificial Sequence
  Cyclic GFR-binding peptide
  MOD_RES (5)..(6): Xaa is C or S
TPPTXXVPTRLSPISILYK

SEQ ID NO: 13099 - protein, 25 aa, Artificial Sequence
  Cyclic GFR-binding peptide
  MOD_RES (6)..(7): Xaa is C or S
GIPEPXXVPEKMSPISILYKDENKN

SEQ ID NO: 13100 - protein, 17 aa, Artificial Sequence
  Cyclic GFR-binding peptide
KMEPISMLYLNDKQQII

SEQ ID NO: 13101 - protein, 17 aa, Artificial Sequence
  Cyclic GFR-binding peptide
ALSPINILYFVGRKPKV

SEQ ID NO: 13102 - protein, 17 aa, Artificial Sequence
  Cyclic GFR-binding peptide
RLSPISILYKDSANNVV

SEQ ID NO: 13103 - protein, 24 aa, Artificial Sequence
  Cyclic GFR-binding peptide
  MOD_RES (6)..(7): Xaa is C or S
HVPKPXXAPTKLSPISVLYKDDSS

SEQ ID NO: 13104 - protein, 13 aa, Artificial Sequence
  Cyclic GFR-binding peptide
VPEKMNAISILYF

SEQ ID NO: 13105 - protein, 20 aa, Artificial Sequence
  Cyclic GFR-binding peptide
  MOD_RES (6)..(7): Xaa is C or S
STPPTXXVPTRLSATSILYY

SEQ ID NO: 13106 - protein, 15 aa, Artificial Sequence
  Cyclic GFR-binding peptide
SATSILYYDENKNVV

SEQ ID NO: 13107 - protein, 23 aa, Artificial Sequence
  Cyclic GFR-binding peptide
  MOD_RES (6)..(7): Xaa is C or S
HVPKPXXAPTKLEPISVLYLDDS

SEQ ID NO: 13108 - protein, 23 aa, Artificial Sequence
  Cyclic GFR-binding peptide
  MOD_RES (6)..(7): Xaa is C or S
GIPEPXXVPEKMSPISILYKDEN

SEQ ID NO: 13109 - protein, 16 aa, Artificial Sequence
  Cyclic GFR-binding peptide
MEPISMLYLNDKQQII

SEQ ID NO: 13110 - protein, 26 aa, Artificial Sequence
  Cyclic GFR-binding peptide
  MOD_RES (6)..(7): Xaa is C or S
RVPSTXXAPVKTSATSMLYYDNGRVL

SEQ ID NO: 13111 - protein, 17 aa, Artificial Sequence
  Cyclic GFR-binding peptide
  MOD_RES (3)..(4): Xaa is C or S
EPXXVPEKMSPINILYF

SEQ ID NO: 13112 - protein, 19 aa, Artificial Sequence
  Cyclic GFR-binding peptide
PTKMEPISMLYLNDKQQII

SEQ ID NO: 13113 - protein, 24 aa, Artificial Sequence
  Cyclic GFR-binding peptide
  MOD_RES (6)..(7): Xaa is C or S
HVPKPXXAPTKLEPISVLYLDDSS

SEQ ID NO: 13114 - protein, 21 aa, Artificial Sequence
  Cyclic GFR-binding peptide
  MOD_RES (6)..(7): Xaa is C or S
GSAGPXXTPTKMEPISMLYLN

SEQ ID NO: 13115 - protein, 13 aa, Artificial Sequence
  Cyclic GFR-binding peptide
VPTRLSPISILYK

SEQ ID NO: 13116 - protein, 15 aa, Artificial Sequence
  Cyclic GFR-binding peptide
SATSILYYDAANNVV

SEQ ID NO: 13117 - protein, 19 aa, Artificial Sequence
  Cyclic GFR-binding peptide
  MOD_RES (5)..(6): Xaa is C or S
ASKAXXVPTKLSATSILYY

SEQ ID NO: 13118 - protein, 24 aa, Artificial Sequence
  Cyclic GFR-binding peptide
  MOD_RES (6)..(7): Xaa is C or S
GSAGPXXTPTKMSATSMLYYNDKQ

SEQ ID NO: 13119 - protein, 18 aa, Artificial Sequence
  Cyclic GFR-binding peptide
EKMSPISILYKDENKNVV

SEQ ID NO: 13120 - protein, 25 aa, Artificial Sequence
  Cyclic GFR-binding peptide
  MOD_RES (6)..(7): Xaa is C or S
HVPKPXXAPTKLSPISVLYKDDSSN

SEQ ID NO: 13121 - protein, 19 aa, Artificial Sequence
  Cyclic GFR-binding peptide
PTRLEPISILYLDSANNVV

SEQ ID NO: 13122 - protein, 17 aa, Artificial Sequence
  Cyclic GFR-binding peptide
  MOD_RES (3)..(4): Xaa is C or S
PTXXVPTRLSPISILYK

SEQ ID NO: 13123 - protein, 15 aa, Artificial Sequence
  Cyclic GFR-binding peptide
  MOD_RES (1)..(2): Xaa is C or S
XXTPTKMSATSMLYY

SEQ ID NO: 13124 - protein, 17 aa, Artificial Sequence
  Cyclic GFR-binding peptide
RLSATSILYYDSANNVV

SEQ ID NO: 13125 - protein, 23 aa, Artificial Sequence
  Cyclic GFR-binding peptide
  MOD_RES (6)..(7): Xaa is C or S
RVPSTXXAPVKTSPISMLYKDNG

SEQ ID NO: 13126 - protein, 23 aa, Artificial Sequence
  Cyclic GFR-binding peptide
  MOD_RES (6)..(7): Xaa is C or S
GIPEPXXVPEKMSATSILYYDEN

SEQ ID NO: 13127 - protein, 15 aa, Artificial Sequence
  Cyclic GFR-binding peptide
  MOD_RES (1)..(2): Xaa is C or S
XXVPQALSPINILYF

SEQ ID NO: 13128 - protein, 19 aa, Artificial Sequence
  Cyclic GFR-binding peptide
PVKTSPISMLYKDNGRVLL

SEQ ID NO: 13129 - protein, 27 aa, Artificial Sequence
  Cyclic GFR-binding peptide
  MOD_RES (6)..(7): Xaa is C or S
ASAAPXXVPQALSPINILYFVGRKPKV

SEQ ID NO: 13130 - protein, 24 aa, Artificial Sequence
  Cyclic GFR-binding peptide
  MOD_RES (6)..(7): Xaa is C or S
HVPKPXXAPTKLSATSVLYYDDSS

SEQ ID NO: 13131 - protein, 17 aa, Artificial Sequence
  Cyclic GFR-binding peptide
KMSPISILYKDENKNVV

SEQ ID NO: 13132 - protein, 18 aa, Artificial Sequence
  Cyclic GFR-binding peptide
  MOD_RES (4)..(5): Xaa is C or S
PASXXVPARLSATSILYY

SEQ ID NO: 13133 - protein, 18 aa, Artificial Sequence
  Cyclic GFR-binding peptide
TRLEPISILYLDSANNVV

SEQ ID NO: 13134 - protein, 18 aa, Artificial Sequence
  Cyclic GFR-binding peptide
  MOD_RES (4)..(5): Xaa is C or S
AAPXXVPQALSPINILYF

SEQ ID NO: 13135 - protein, 15 aa, Artificial Sequence
  Cyclic GFR-binding peptide
  MOD_RES (1)..(2): Xaa is C or S
XXVPEKMSPINILYF

SEQ ID NO: 13136 - protein, 25 aa, Artificial Sequence
  Cyclic GFR-binding peptide
  MOD_RES (6)..(7): Xaa is C or S
GIPEPXXVPEKMEPISILYLDENKN

SEQ ID NO: 13137 - protein, 23 aa, Artificial Sequence
  Cyclic GFR-binding peptide
  MOD_RES (6)..(7): Xaa is C or S
STPPTXXVPTRLSPISILYKDSA

SEQ ID NO: 13138 - protein, 26 aa, Artificial Sequence
  Cyclic GFR-binding peptide
  MOD_RES (6)..(7): Xaa is C or S
GIPEPXXVPEKMSATSILYYDENKNV

SEQ ID NO: 13139 - protein, 18 aa, Artificial Sequence
  Cyclic GFR-binding peptide
TKMEPISMLYLNDKQQII

SEQ ID NO: 13140 - protein, 17 aa, Artificial Sequence
  Cyclic GFR-binding peptide
KTSPISMLYKDNGRVLL

SEQ ID NO: 13141 - protein, 20 aa, Artificial Sequence
  Cyclic GFR-binding peptide
  MOD_RES (6)..(7): Xaa is C or S
GIPEPXXVPEKMSPISILYK

SEQ ID NO: 13142 - protein, 27 aa, Artificial Sequence
  Cyclic GFR-binding peptide
  MOD_RES (6)..(7): Xaa is C or S
STPPTXXVPTRLSPISILYKDSANNVV

SEQ ID NO: 13143 - protein, 23 aa, Artificial Sequence
  Cyclic GFR-binding peptide
  MOD_RES (6)..(7): Xaa is C or S
KASKAXXVPTKLSATSILYYDKG

SEQ ID NO: 13144 - protein, 17 aa, Artificial Sequence
  Cyclic GFR-binding peptide
KMSATSMLYYNDKQQII

SEQ ID NO: 13145 - protein, 21 aa, Artificial Sequence
  Cyclic GFR-binding peptide
  MOD_RES (6)..(7): Xaa is C or S
ASASPXXVPQDLSPINILYFV

SEQ ID NO: 13146 - protein, 24 aa, Artificial Sequence
  Cyclic GFR-binding peptide
  MOD_RES (6)..(7): Xaa is C or S
GSAGPXXTPTKMEPISMLYLNDKQ

SEQ ID NO: 13147 - protein, 24 aa, Artificial Sequence
  Cyclic GFR-binding peptide
  MOD_RES (6)..(7): Xaa is C or S
GSAGPXXTPTKMSPISMLYKNDKQ

SEQ ID NO: 13148 - protein, 27 aa, Artificial Sequence
  Cyclic GFR-binding peptide
  MOD_RES (6)..(7): Xaa is C or S
RVPSTXXAPVKTSATSMLYYDNGRVLL

SEQ ID NO: 13149 - protein, 23 aa, Artificial Sequence
  Cyclic GFR-binding peptide
  MOD_RES (6)..(7): Xaa is C or S
RVPSTXXAPVKTSATSMLYYDNG

SEQ ID NO: 13150 - protein, 23 aa, Artificial Sequence
  Cyclic GFR-binding peptide
  MOD_RES (6)..(7): Xaa is C or S
ASAAPXXVPQALSPINILYFVGR

SEQ ID NO: 13151 - protein, 18 aa, Artificial Sequence
  Cyclic GFR-binding peptide
QALSPINILYFVGRKPKV

SEQ ID NO: 13152 - protein, 16 aa, Artificial Sequence
  Cyclic GFR-binding peptide
MEPISILYLDENKNVV

SEQ ID NO: 13153 - protein, 14 aa, Artificial Sequence
  Cyclic GFR-binding peptide
  MOD_RES (1)..(1): Xaa is C or S
XTPTKMSATSMLYY

SEQ ID NO: 13154 - protein, 15 aa, Artificial Sequence
  Cyclic GFR-binding peptide
  MOD_RES (1)..(2): Xaa is C or S
XXTPTKMSPISMLYK

SEQ ID NO: 13155 - protein, 16 aa, Artificial Sequence
  Cyclic GFR-binding peptide
  MOD_RES (2)..(3): Xaa is C or S
PXXVSQDLSPINILYF

SEQ ID NO: 13156 - protein, 27 aa, Artificial Sequence
  Cyclic GFR-binding peptide
  MOD_RES (6)..(7): Xaa is C or S
HVPKPXXAPTKLSATSVLYYDDSSNVI

SEQ ID NO: 13157 - protein, 23 aa, Artificial Sequence
  Cyclic GFR-binding peptide
  MOD_RES (6)..(7): Xaa is C or S
GSAGPXXTPTKMSATSMLYYNDK

SEQ ID NO: 13158 - protein, 21 aa, Artificial Sequence
  Cyclic GFR-binding peptide
  MOD_RES (6)..(7): Xaa is C or S
RVPSTXXAPVKTSPISMLYKD

SEQ ID NO: 13159 - protein, 23 aa, Artificial Sequence
  Cyclic GFR-binding peptide
  MOD_RES (6)..(7): Xaa is C or S
GSAGPXXTPTKMSPISMLYKNDK

SEQ ID NO: 13160 - protein, 16 aa, Artificial Sequence
  Cyclic GFR-binding peptide
LSPISILYKDSANNVV

SEQ ID NO: 13161 - protein, 24 aa, Artificial Sequence
  Cyclic GFR-binding peptide
  MOD_RES (6)..(7): Xaa is C or S
AAPASXXVPARLSATSILYYDAAN

SEQ ID NO: 13162 - protein, 15 aa, Artificial Sequence
  Cyclic GFR-binding peptide
SPISILYKDENKNVV

SEQ ID NO: 13163 - protein, 19 aa, Artificial Sequence
  Cyclic GFR-binding peptide
PEKMSPISILYKDENKNVV

SEQ ID NO: 13164 - protein, 21 aa, Artificial Sequence
  Cyclic GFR-binding peptide
  MOD_RES (6)..(7): Xaa is C or S
GIPEPXXVPEKMNAISILYFD

SEQ ID NO: 13165 - protein, 21 aa, Artificial Sequence
  Cyclic GFR-binding peptide
  MOD_RES (6)..(7): Xaa is C or S
HVPKPXXAPTKLEPISVLYLD

SEQ ID NO: 13166 - protein, 17 aa, Artificial Sequence
  Cyclic GFR-binding peptide
  MOD_RES (3)..(4): Xaa is C or S
SPXXVSQDLSPINILYF

SEQ ID NO: 13167 - protein, 16 aa, Artificial Sequence
  Cyclic GFR-binding peptide
TSATSMLYYDNGRVLL

SEQ ID NO: 13168 - protein, 20 aa, Artificial Sequence
  Cyclic GFR-binding peptide
  MOD_RES (6)..(7): Xaa is C or S
ASASPXXVPQDLSPINILYF

SEQ ID NO: 13169 - protein, 15 aa, Artificial Sequence
  Cyclic GFR-binding peptide
SATSMLYYNDKQQII

SEQ ID NO: 13170 - protein, 19 aa, Artificial Sequence
  Cyclic GFR-binding peptide
  MOD_RES (5)..(6): Xaa is C or S
SAAPXXVPQALSPINILYF

SEQ ID NO: 13171 - protein, 22 aa, Artificial Sequence
  Cyclic GFR-binding peptide
  MOD_RES (6)..(7): Xaa is C or S
ASASPXXVSQDLSPINILYFIG

SEQ ID NO: 13172 - protein, 14 aa, Artificial Sequence
  Cyclic GFR-binding peptide
  MOD_RES (1)..(1): Xaa is C or S
XTPTKMSPISMLYK

SEQ ID NO: 13173 - protein, 21 aa, Artificial Sequence
  Cyclic GFR-binding peptide
  MOD_RES (6)..(7): Xaa is C or S
ASASPXXVSQDLSPINILYFI

SEQ ID NO: 13174 - protein, 14 aa, Artificial Sequence
  Cyclic GFR-binding peptide
  MOD_RES (1)..(1): Xaa is C or S
XVPEKMSPINILYF

SEQ ID NO: 13175 - protein, 15 aa, Artificial Sequence
  Cyclic GFR-binding peptide
LLVRGNDMIQMTINS

SEQ ID NO: 13176 - protein, 27 aa, Artificial Sequence
  Cyclic GFR-binding peptide
  MOD_RES (21)..(22): Xaa is C or S
LLVRGNDMIQMTINSTKVPAXXTSPVR

SEQ ID NO: 13177 - protein, 14 aa, Artificial Sequence
  Cyclic GFR-binding peptide
  MOD_RES (14)..(14): Xaa is C or S
MIQMTINSMKTPTX

SEQ ID NO: 13178 - protein, 27 aa, Artificial Sequence
  Cyclic GFR-binding peptide
  MOD_RES (21)..(22): Xaa is C or S
VVNNAADMIQITINSLRAPVXXSAPAA

SEQ ID NO: 13179 - protein, 24 aa, Artificial Sequence
  Cyclic GFR-binding peptide
  MOD_RES (18)..(19): Xaa is C or S
NAADMIQITINSLRAPVXXSAPAA

SEQ ID NO: 13180 - protein, 16 aa, Artificial Sequence
  Cyclic GFR-binding peptide
  MOD_RES (14)..(15): Xaa is C or S
MIQMTINSTKVPAXXT

SEQ ID NO: 13181 - protein, 23 aa, Artificial Sequence
  Cyclic GFR-binding peptide
  MOD_RES (17)..(18): Xaa is C or S
KDNMIQMTINSMKTPTXXPGASG

SEQ ID NO: 13182 - protein, 16 aa, Artificial Sequence
  Cyclic GFR-binding peptide
IIQQKDNMIQMTINSM

SEQ ID NO: 13183 - protein, 24 aa, Artificial Sequence
  Cyclic GFR-binding peptide
  MOD_RES (18)..(19): Xaa is C or S
QKDNMIQMTINSMKTPTXXPGASG

SEQ ID NO: 13184 - protein, 13 aa, Artificial Sequence
  Cyclic GFR-binding peptide
MIQMTINSTKVPA

SEQ ID NO: 13185 - protein, 23 aa, Artificial Sequence
  Cyclic GFR-binding peptide
  MOD_RES (17)..(18): Xaa is C or S
AADMIQITINSLRAPVXXSAPAA

SEQ ID NO: 13186 - protein, 22 aa, Artificial Sequence
  Cyclic GFR-binding peptide
  MOD_RES (16)..(17): Xaa is C or S
ADMIQITINSLRAPVXXSAPAA

SEQ ID NO: 13187 - protein, 16 aa, Artificial Sequence
  Cyclic GFR-binding peptide
  MOD_RES (14)..(15): Xaa is C or S
MIQITINSLRAPVXXS

SEQ ID NO: 13188 - protein, 15 aa, Artificial Sequence
  Cyclic GFR-binding peptide
VVNNAADMIQITINS

SEQ ID NO: 13189 - protein, 15 aa, Artificial Sequence
  Cyclic GFR-binding peptide
  MOD_RES (14)..(15): Xaa is C or S
MIQMTINSTKVPAXX

SEQ ID NO: 13190 - protein, 24 aa, Artificial Sequence
  Cyclic GFR-binding peptide
  MOD_RES (18)..(19): Xaa is C or S
SSDDMIQVTINSLKTPAXXPKPVH

SEQ ID NO: 13191 - protein, 15 aa, Artificial Sequence
  Cyclic GFR-binding peptide
VVNNASDMIQITINS

SEQ ID NO: 13192 - protein, 25 aa, Artificial Sequence
  Cyclic GFR-binding peptide
  MOD_RES (19)..(20): Xaa is C or S
NSSDDMIQVTINSLKTPAXXPKPVH

SEQ ID NO: 13193 - protein, 15 aa, Artificial Sequence
  Cyclic GFR-binding peptide
  MOD_RES (14)..(15): Xaa is C or S
MIQITINSLRTPVXX

SEQ ID NO: 13194 - protein, 27 aa, Artificial Sequence
  Cyclic GFR-binding peptide
  MOD_RES (21)..(22): Xaa is C or S
IVNSSDDMIQVTINSLKTPAXXPKPVH

SEQ ID NO: 13195 - protein, 23 aa, Artificial Sequence
  Cyclic GFR-binding peptide
  MOD_RES (17)..(18): Xaa is C or S
SDDMIQVTINSLKTPAXXPKPVH

SEQ ID NO: 13196 - protein, 19 aa, Artificial Sequence
  Cyclic GFR-binding peptide
IIQQKDNMIQMTINSMKTP

SEQ ID NO: 13197 - protein, 22 aa, Artificial Sequence
  Cyclic GFR-binding peptide
  MOD_RES (16)..(17): Xaa is C or S
SDMIQITINSLRTPVXXTPPTS

SEQ ID NO: 13198 - protein, 25 aa, Artificial Sequence
  Cyclic GFR-binding peptide
  MOD_RES (19)..(20): Xaa is C or S
QQKDNMIQMTINSMKTPTXXPGASG

SEQ ID NO: 13199 - protein, 26 aa, Artificial Sequence
  Cyclic GFR-binding peptide
  MOD_RES (20)..(21): Xaa is C or S
VNSSDDMIQVTINSLKTPAXXPKPVH

SEQ ID NO: 13200 - protein, 19 aa, Artificial Sequence
  Cyclic GFR-binding peptide
  MOD_RES (14)..(15): Xaa is C or S
MIQMTINSTKVPAXXTSPV

SEQ ID NO: 13201 - protein, 17 aa, Artificial Sequence
  Cyclic GFR-binding peptide
  MOD_RES (14)..(15): Xaa is C or S
MIQITINSLRAPVXXSA

SEQ ID NO: 13202 - protein, 21 aa, Artificial Sequence
  Cyclic GFR-binding peptide
  MOD_RES (15)..(16): Xaa is C or S
DMIQVTINSLKTPAXXPKPVH

SEQ ID NO: 13203 - protein, 20 aa, Artificial Sequence
  Cyclic GFR-binding peptide
  MOD_RES (14)..(15): Xaa is C or S
MIQMTINSTKVPAXXTSPVR

SEQ ID NO: 13204 - protein, 25 aa, Artificial Sequence
  Cyclic GFR-binding peptide
  MOD_RES (19)..(20): Xaa is C or S
VRGNDMIQMTINSTKVPAXXTSPVR

SEQ ID NO: 13205 - protein, 19 aa, Artificial Sequence
  Cyclic GFR-binding peptide
VVNNASDMIQITINSLRTP

SEQ ID NO: 13206 - protein, 27 aa, Artificial Sequence
  Cyclic GFR-binding peptide
  MOD_RES (21)..(22): Xaa is C or S
IIQQKDNMIQMTINSMKTPTXXPGASG

SEQ ID NO: 13207 - protein, 20 aa, Artificial Sequence
  Cyclic GFR-binding peptide
  MOD_RES (14)..(15): Xaa is C or S
MIQMTINSMKTPTXXPGASG

SEQ ID NO: 13208 - protein, 14 aa, Artificial Sequence
  Cyclic GFR-binding peptide
  MOD_RES (14)..(14): Xaa is C or S
MIQITINSLRTPVX

SEQ ID NO: 13209 - protein, 13 aa, Artificial Sequence
  Cyclic GFR-binding peptide
MIQITINSLRAPV

SEQ ID NO: 13210 - protein, 20 aa, Artificial Sequence
  Cyclic GFR-binding peptide
  MOD_RES (14)..(15): Xaa is C or S
MIQVTINSLKTPAXXPKPVH

SEQ ID NO: 13211 - protein, 16 aa, Artificial Sequence
  Cyclic GFR-binding peptide
LLVRGNDMIQMTINST

SEQ ID NO: 13212 - protein, 27 aa, Artificial Sequence
  Cyclic GFR-binding peptide
  MOD_RES (21)..(22): Xaa is C or S
VVNNASDMIQITINSLRTPVXXTPPTS

SEQ ID NO: 13213 - protein, 24 aa, Artificial Sequence
  Cyclic GFR-binding peptide
  MOD_RES (18)..(19): Xaa is C or S
RGNDMIQMTINSTKVPAXXTSPVR

SEQ ID NO: 13214 - protein, 15 aa, Artificial Sequence
  Cyclic GFR-binding peptide
IIQQKDNMIQMTINS

SEQ ID NO: 13215 - protein, 18 aa, Artificial Sequence
  Cyclic GFR-binding peptide
  MOD_RES (14)..(15): Xaa is C or S
MIQITINSLRAPVXXSAP

SEQ ID NO: 13216 - protein, 16 aa, Artificial Sequence
  Cyclic GFR-binding peptide
VVNNAADMIQITINSL

SEQ ID NO: 13217 - protein, 14 aa, Artificial Sequence
  Cyclic GFR-binding peptide
  MOD_RES (14)..(14): Xaa is C or S
MIQMTINSTKVPAX

SEQ ID NO: 13218 - protein, 17 aa, Artificial Sequence
  Cyclic GFR-binding peptide
LLVRGNDMIQMTINSTK

SEQ ID NO: 13219 - protein, 19 aa, Artificial Sequence
  Cyclic GFR-binding peptide
  MOD_RES (14)..(15): Xaa is C or S
MIQITINSLRTPVXXTPPT

SEQ ID NO: 13220 - protein, 17 aa, Artificial Sequence
  Cyclic GFR-binding peptide
VVNNASDMIQITINSLR

SEQ ID NO: 13221 - protein, 16 aa, Artificial Sequence
  Cyclic GFR-binding peptide
VVNNASDMIQITINSL

SEQ ID NO: 13222 - protein, 22 aa, Artificial Sequence
  Cyclic GFR-binding peptide
  MOD_RES (16)..(17): Xaa is C or S
DDMIQVTINSLKTPAXXPKPVH

SEQ ID NO: 13223 - protein, 21 aa, Artificial Sequence
  Cyclic GFR-binding peptide
  MOD_RES (15)..(16): Xaa is C or S
DMIQITINSLRTPVXXTPPTS

SEQ ID NO: 13224 - protein, 21 aa, Artificial Sequence
  Cyclic GFR-binding peptide
  MOD_RES (15)..(16): Xaa is C or S
DMIQITINSLRAPVXXSAPAA

SEQ ID NO: 13225 - protein, 18 aa, Artificial Sequence
  Cyclic GFR-binding peptide
  MOD_RES (14)..(15): Xaa is C or S
MIQMTINSMKTPTXXPGA

SEQ ID NO: 13226 - protein, 16 aa, Artificial Sequence
  Cyclic GFR-binding peptide
  MOD_RES (14)..(15): Xaa is C or S
MIQMTINSMKTPTXXP

SEQ ID NO: 13227 - protein, 25 aa, Artificial Sequence
  Cyclic GFR-binding peptide
  MOD_RES (19)..(20): Xaa is C or S
NNAADMIQITINSLRAPVXXSAPAA

SEQ ID NO: 13228 - protein, 15 aa, Artificial Sequence
  Cyclic GFR-binding peptide
  MOD_RES (14)..(15): Xaa is C or S
MIQITINSLRAPVXX

SEQ ID NO: 13229 - protein, 26 aa, Artificial Sequence
  Cyclic GFR-binding peptide
  MOD_RES (20)..(21): Xaa is C or S
IQQKDNMIQMTINSMKTPTXXPGASG

SEQ ID NO: 13230 - protein, 18 aa, Artificial Sequence
  Cyclic GFR-binding peptide
LLVRGNDMIQMTINSTKV

SEQ ID NO: 13231 - protein, 13 aa, Artificial Sequence
  Cyclic GFR-binding peptide
MIQITINSLRTPV

SEQ ID NO: 13232 - protein, 15 aa, Artificial Sequence
  Cyclic GFR-binding peptide
  MOD_RES (14)..(15): Xaa is C or S
MIQMTINSMKTPTXX

SEQ ID NO: 13233 - protein, 25 aa, Artificial Sequence
  Cyclic GFR-binding peptide
  MOD_RES (19)..(20): Xaa is C or S
NNASDMIQITINSLRTPVXXTPPTS

SEQ ID NO: 13234 - protein, 16 aa, Artificial Sequence
  Cyclic GFR-binding peptide
  MOD_RES (14)..(15): Xaa is C or S
MIQITINSLRTPVXXT

SEQ ID NO: 13235 - protein, 18 aa, Artificial Sequence
  Cyclic GFR-binding peptide
VVNNASDMIQITINSLRT

SEQ ID NO: 13236 - protein, 26 aa, Artificial Sequence
  Cyclic GFR-binding peptide
  MOD_RES (20)..(21): Xaa is C or S
VNNASDMIQITINSLRTPVXXTPPTS

SEQ ID NO: 13237 - protein, 18 aa, Artificial Sequence
  Cyclic GFR-binding peptide
  MOD_RES (14)..(15): Xaa is C or S
MIQITINSLRTPVXXTPP

SEQ ID NO: 13238 - protein, 17 aa, Artificial Sequence
  Cyclic GFR-binding peptide
  MOD_RES (14)..(15): Xaa is C or S
MIQMTINSMKTPTXXPG

SEQ ID NO: 13239 - protein, 13 aa, Artificial Sequence
  Cyclic GFR-binding peptide
MIQMTINSMKTPT

SEQ ID NO: 13240 - protein, 18 aa, Artificial Sequence
  Cyclic GFR-binding peptide
VVNNAADMIQITINSLRA

SEQ ID NO: 13241 - protein, 22 aa, Artificial Sequence
  Cyclic GFR-binding peptide
  MOD_RES (16)..(17): Xaa is C or S
NDMIQMTINSTKVPAXXTSPVR

SEQ ID NO: 13242 - protein, 24 aa, Artificial Sequence
  Cyclic GFR-binding peptide
  MOD_RES (18)..(19): Xaa is C or S
NASDMIQITINSLRTPVXXTPPTS

SEQ ID NO: 13243 - protein, 18 aa, Artificial Sequence
  Cyclic GFR-binding peptide
  MOD_RES (14)..(15): Xaa is C or S
MIQMTINSTKVPAXXTSP

SEQ ID NO: 13244 - protein, 17 aa, Artificial Sequence
  Cyclic GFR-binding peptide
VVNNAADMIQITINSLR

SEQ ID NO: 13245 - protein, 17 aa, Artificial Sequence
  Cyclic GFR-binding peptide
  MOD_RES (14)..(15): Xaa is C or S
MIQMTINSTKVPAXXTS

SEQ ID NO: 13246 - protein, 23 aa, Artificial Sequence
  Cyclic GFR-binding peptide
  MOD_RES (17)..(18): Xaa is C or S
GNDMIQMTINSTKVPAXXTSPVR

SEQ ID NO: 13247 - protein, 17 aa, Artificial Sequence
  Cyclic GFR-binding peptide
IIQQKDNMIQMTINSMK

SEQ ID NO: 13248 - protein, 21 aa, Artificial Sequence
  Cyclic GFR-binding peptide
  MOD_RES (15)..(16): Xaa is C or S
DMIQMTINSTKVPAXXTSPVR

SEQ ID NO: 13249 - protein, 19 aa, Artificial Sequence
  Cyclic GFR-binding peptide
VVNNAADMIQITINSLRAP

SEQ ID NO: 13250 - protein, 26 aa, Artificial Sequence
  Cyclic GFR-binding peptide
  MOD_RES (20)..(21): Xaa is C or S
LVRGNDMIQMTINSTKVPAXXTSPVR

SEQ ID NO: 13251 - protein, 19 aa, Artificial Sequence
  Cyclic GFR-binding peptide
  MOD_RES (14)..(15): Xaa is C or S
MIQITINSLRAPVXXSAPA

SEQ ID NO: 13252 - protein, 17 aa, Artificial Sequence
  Cyclic GFR-binding peptide
  MOD_RES (14)..(15): Xaa is C or S
MIQITINSLRTPVXXTP

SEQ ID NO: 13253 - protein, 22 aa, Artificial Sequence
  Cyclic GFR-binding peptide
  MOD_RES (16)..(17): Xaa is C or S
DNMIQMTINSMKTPTXXPGASG

SEQ ID NO: 13254 - protein, 18 aa, Artificial Sequence
  Cyclic GFR-binding peptide
IIQQKDNMIQMTINSMKT

SEQ ID NO: 13255 - protein, 20 aa, Artificial Sequence
  Cyclic GFR-binding peptide
  MOD_RES (14)..(15): Xaa is C or S
MIQITINSLRTPVXXTPPTS

SEQ ID NO: 13256 - protein, 21 aa, Artificial Sequence
  Cyclic GFR-binding peptide
  MOD_RES (15)..(16): Xaa is C or S
NMIQMTINSMKTPTXXPGASG

SEQ ID NO: 13257 - protein, 14 aa, Artificial Sequence
  Cyclic GFR-binding peptide
  MOD_RES (14)..(14): Xaa is C or S
MIQITINSLRAPVX

SEQ ID NO: 13258 - protein, 26 aa, Artificial Sequence
  Cyclic GFR-binding peptide
  MOD_RES (20)..(21): Xaa is C or S
VNNAADMIQITINSLRAPVXXSAPAA

SEQ ID NO: 13259 - protein, 23 aa, Artificial Sequence
  Cyclic GFR-binding peptide
  MOD_RES (17)..(18): Xaa is C or S
ASDMIQITINSLRTPVXXTPPTS

SEQ ID NO: 13260 - protein, 19 aa, Artificial Sequence
  Cyclic GFR-binding peptide
  MOD_RES (14)..(15): Xaa is C or S
MIQMTINSMKTPTXXPGAS

SEQ ID NO: 13261 - protein, 19 aa, Artificial Sequence
  Cyclic GFR-binding peptide
LLVRGNDMIQMTINSTKVP

SEQ ID NO: 13262 - protein, 20 aa, Artificial Sequence
  Cyclic GFR-binding peptide
  MOD_RES (14)..(15): Xaa is C or S
MIQITINSLRAPVXXSAPAA

SEQ ID NO: 13263 - protein, 15 aa, Artificial Sequence
  Cyclic GFR-binding peptide
SNITMQIMDNGRVLL

SEQ ID NO: 13264 - protein, 27 aa, Artificial Sequence
  Cyclic GFR-binding peptide
  MOD_RES (6)..(7): Xaa is C or S
RVPSTXXAPVKTSNITMQIMDNGRVLL

SEQ ID NO: 13265 - protein, 14 aa, Artificial Sequence
  Cyclic GFR-binding peptide
  MOD_RES (1)..(1): Xaa is C or S
XTPTKMSNITMQIM

SEQ ID NO: 13266 - protein, 27 aa, Artificial Sequence
  Cyclic GFR-binding peptide
  MOD_RES (6)..(7): Xaa is C or S
AAPASXXVPARLSNITIQIMDAANNVV

SEQ ID NO: 13267 - protein, 24 aa, Artificial Sequence
  Cyclic GFR-binding peptide
  MOD_RES (6)..(7): Xaa is C or S
AAPASXXVPARLSNITIQIMDAAN

SEQ ID NO: 13268 - protein, 16 aa, Artificial Sequence
  Cyclic GFR-binding peptide
  MOD_RES (2)..(3): Xaa is C or S
TXXAPVKTSNITMQIM

SEQ ID NO: 13269 - protein, 23 aa, Artificial Sequence
  Cyclic GFR-binding peptide
  MOD_RES (6)..(7): Xaa is C or S
GSAGPXXTPTKMSNITMQIMNDK

SEQ ID NO: 13270 - protein, 16 aa, Artificial Sequence
  Cyclic GFR-binding peptide
MSNITMQIMNDKQQII

SEQ ID NO: 13271 - protein, 24 aa, Artificial Sequence
  Cyclic GFR-binding peptide
  MOD_RES (6)..(7): Xaa is C or S
GSAGPXXTPTKMSNITMQIMNDKQ

SEQ ID NO: 13272 - protein, 13 aa, Artificial Sequence
  Cyclic GFR-binding peptide
APVKTSNITMQIM

SEQ ID NO: 13273 - protein, 23 aa, Artificial Sequence
  Cyclic GFR-binding peptide
  MOD_RES (6)..(7): Xaa is C or S
AAPASXXVPARLSNITIQIMDAA

SEQ ID NO: 13274 - protein, 22 aa, Artificial Sequence
  Cyclic GFR-binding peptide
  MOD_RES (6)..(7): Xaa is C or S
AAPASXXVPARLSNITIQIMDA

SEQ ID NO: 13275 - protein, 16 aa, Artificial Sequence
  Cyclic GFR-binding peptide
  MOD_RES (2)..(3): Xaa is C or S
SXXVPARLSNITIQIM

SEQ ID NO: 13276 - protein, 15 aa, Artificial Sequence
  Cyclic GFR-binding peptide
SNITIQIMDAANNVV

SEQ ID NO: 13277 - protein, 15 aa, Artificial Sequence
  Cyclic GFR-binding peptide
  MOD_RES (1)..(2): Xaa is C or S
XXAPVKTSNITMQIM

SEQ ID NO: 13278 - protein, 24 aa, Artificial Sequence
  Cyclic GFR-binding peptide
  MOD_RES (6)..(7): Xaa is C or S
HVPKPXXAPTKLSNITVQIMDDSS

SEQ ID NO: 13279 - protein, 15 aa, Artificial Sequence
  Cyclic GFR-binding peptide
SNITIQIMDSANNVV

SEQ ID NO: 13280 - protein, 25 aa, Artificial Sequence
  Cyclic GFR-binding peptide
  MOD_RES (6)..(7): Xaa is C or S
HVPKPXXAPTKLSNITVQIMDDSSN

SEQ ID NO: 13281 - protein, 15 aa, Artificial Sequence
  Cyclic GFR-binding peptide
  MOD_RES (1)..(2): Xaa is C or S
XXVPTRLSNITIQIM

SEQ ID NO: 13282 - protein, 27 aa, Artificial Sequence
  Cyclic GFR-binding peptide
  MOD_RES (6)..(7): Xaa is C or S
HVPKPXXAPTKLSNITVQIMDDSSNVI

SEQ ID NO: 13283 - protein, 23 aa, Artificial Sequence
  Cyclic GFR-binding peptide
  MOD_RES (6)..(7): Xaa is C or S
HVPKPXXAPTKLSNITVQIMDDS

SEQ ID NO: 13284 - protein, 19 aa, Artificial Sequence
  Cyclic GFR-binding peptide
PTKMSNITMQIMNDKQQII

SEQ ID NO: 13285 - protein, 22 aa, Artificial Sequence
  Cyclic GFR-binding peptide
  MOD_RES (6)..(7): Xaa is C or S
STPPTXXVPTRLSNITIQIMDS

SEQ ID NO: 13286 - protein, 25 aa, Artificial Sequence
  Cyclic GFR-binding peptide
  MOD_RES (6)..(7): Xaa is C or S
GSAGPXXTPTKMSNITMQIMNDKQQ

SEQ ID NO: 13287 - protein, 26 aa, Artificial Sequence
  Cyclic GFR-binding peptide
  MOD_RES (6)..(7): Xaa is C or S
HVPKPXXAPTKLSNITVQIMDDSSNV

SEQ ID NO: 13288 - protein, 19 aa, Artificial Sequence
  Cyclic GFR-binding peptide
  MOD_RES (5)..(6): Xaa is C or S
VPSTXXAPVKTSNITMQIM

SEQ ID NO: 13289 - protein, 17 aa, Artificial Sequence
  Cyclic GFR-binding peptide
  MOD_RES (3)..(4): Xaa is C or S
ASXXVPARLSNITIQIM

SEQ ID NO: 13290 - protein, 21 aa, Artificial Sequence
  Cyclic GFR-binding peptide
  MOD_RES (6)..(7): Xaa is C or S
HVPKPXXAPTKLSNITVQIMD

SEQ ID NO: 13291 - protein, 20 aa, Artificial Sequence
  Cyclic GFR-binding peptide
  MOD_RES (6)..(7): Xaa is C or S
RVPSTXXAPVKTSNITMQIM

SEQ ID NO: 13292 - protein, 25 aa, Artificial Sequence
  Cyclic GFR-binding peptide
  MOD_RES (6)..(7): Xaa is C or S
RVPSTXXAPVKTSNITMQIMDNGRV

SEQ ID NO: 13293 - protein, 19 aa, Artificial Sequence
  Cyclic GFR-binding peptide
PTRLSNITIQIMDSANNVV

SEQ ID NO: 13294 - protein, 27 aa, Artificial Sequence
  Cyclic GFR-binding peptide
  MOD_RES (6)..(7): Xaa is C or S
GSAGPXXTPTKMSNITMQIMNDKQQII

SEQ ID NO: 13295 - protein, 20 aa, Artificial Sequence
  Cyclic GFR-binding peptide
  MOD_RES (6)..(7): Xaa is C or S
GSAGPXXTPTKMSNITMQIM

SEQ ID NO: 13296 - protein, 14 aa, Artificial Sequence
  Cyclic GFR-binding peptide
  MOD_RES (1)..(1): Xaa is C or S
XVPTRLSNITIQIM

SEQ ID NO: 13297 - protein, 13 aa, Artificial Sequence
  Cyclic GFR-binding peptide
VPARLSNITIQIM

SEQ ID NO: 13298 - protein, 20 aa, Artificial Sequence
  Cyclic GFR-binding peptide
  MOD_RES (6)..(7): Xaa is C or S
HVPKPXXAPTKLSNITVQIM

SEQ ID NO: 13299 - protein, 16 aa, Artificial Sequence
  Cyclic GFR-binding peptide
TSNITMQIMDNGRVLL

SEQ ID NO: 13300 - protein, 27 aa, Artificial Sequence
  Cyclic GFR-binding peptide
  MOD_RES (6)..(7): Xaa is C or S
STPPTXXVPTRLSNITIQIMDSANNVV

SEQ ID NO: 13301 - protein, 24 aa, Artificial Sequence
  Cyclic GFR-binding peptide
  MOD_RES (6)..(7): Xaa is C or S
RVPSTXXAPVKTSNITMQIMDNGR

SEQ ID NO: 13302 - protein, 15 aa, Artificial Sequence
  Cyclic GFR-binding peptide
SNITMQIMNDKQQII

SEQ ID NO: 13303 - protein, 18 aa, Artificial Sequence
  Cyclic GFR-binding peptide
  MOD_RES (4)..(5): Xaa is C or S
PASXXVPARLSNITIQIM

SEQ ID NO: 13304 - protein, 16 aa, Artificial Sequence
  Cyclic GFR-binding peptide
LSNITIQIMDAANNVV

SEQ ID NO: 13305 - protein, 14 aa, Artificial Sequence
  Cyclic GFR-binding peptide
  MOD_RES (1)..(1): Xaa is C or S
XAPVKTSNITMQIM

SEQ ID NO: 13306 - protein, 17 aa, Artificial Sequence
  Cyclic GFR-binding peptide
KTSNITMQIMDNGRVLL

SEQ ID NO: 13307 - protein, 19 aa, Artificial Sequence
  Cyclic GFR-binding peptide
  MOD_RES (5)..(6): Xaa is C or S
TPPTXXVPTRLSNITIQIM

SEQ ID NO: 13308 - protein, 17 aa, Artificial Sequence
  Cyclic GFR-binding peptide
RLSNITIQIMDSANNVV

SEQ ID NO: 13309 - protein, 16 aa, Artificial Sequence
  Cyclic GFR-binding peptide
LSNITIQIMDSANNVV

SEQ ID NO: 13310 - protein, 22 aa, Artificial Sequence
  Cyclic GFR-binding peptide
  MOD_RES (6)..(7): Xaa is C or S
HVPKPXXAPTKLSNITVQIMDD

SEQ ID NO: 13311 - protein, 21 aa, Artificial Sequence
  Cyclic GFR-binding peptide
  MOD_RES (6)..(7): Xaa is C or S
STPPTXXVPTRLSNITIQIMD

SEQ ID NO: 13312 - protein, 21 aa, Artificial Sequence
  Cyclic GFR-binding peptide
  MOD_RES (6)..(7): Xaa is C or S
AAPASXXVPARLSNITIQIMD

SEQ ID NO: 13313 - protein, 18 aa, Artificial Sequence
  Cyclic GFR-binding peptide
  MOD_RES (4)..(5): Xaa is C or S
AGPXXTPTKMSNITMQIM

SEQ ID NO: 13314 - protein, 16 aa, Artificial Sequence
  Cyclic GFR-binding peptide
  MOD_RES (2)..(3): Xaa is C or S
PXXTPTKMSNITMQIM

SEQ ID NO: 13315 - protein, 25 aa, Artificial Sequence
  Cyclic GFR-binding peptide
  MOD_RES (6)..(7): Xaa is C or S
AAPASXXVPARLSNITIQIMDAANN

SEQ ID NO: 13316 - protein, 15 aa, Artificial Sequence
  Cyclic GFR-binding peptide
  MOD_RES (1)..(2): Xaa is C or S
XXVPARLSNITIQIM

SEQ ID NO: 13317 - protein, 26 aa, Artificial Sequence
  Cyclic GFR-binding peptide
  MOD_RES (6)..(7): Xaa is C or S
GSAGPXXTPTKMSNITMQIMNDKQQI

SEQ ID NO: 13318 - protein, 18 aa, Artificial Sequence
  Cyclic GFR-binding peptide
VKTSNITMQIMDNGRVLL

SEQ ID NO: 13319 - protein, 13 aa, Artificial Sequence
  Cyclic GFR-binding peptide
VPTRLSNITIQIM

SEQ ID NO: 13320 - protein, 15 aa, Artificial Sequence
  Cyclic GFR-binding peptide
  MOD_RES (1)..(2): Xaa is C or S
XXTPTKMSNITMQIM

SEQ ID NO: 13321 - protein, 25 aa, Artificial Sequence
  Cyclic GFR-binding peptide
  MOD_RES (6)..(7): Xaa is C or S
STPPTXXVPTRLSNITIQIMDSANN

SEQ ID NO: 13322 - protein, 16 aa, Artificial Sequence
  Cyclic GFR-binding peptide
  MOD_RES (2)..(3): Xaa is C or S
TXXVPTRLSNITIQIM

SEQ ID NO: 13323 - protein, 18 aa, Artificial Sequence
  Cyclic GFR-binding peptide
TRLSNITIQIMDSANNVV

SEQ ID NO: 13324 - protein, 26 aa, Artificial Sequence
  Cyclic GFR-binding peptide
  MOD_RES (6)..(7): Xaa is C or S
STPPTXXVPTRLSNITIQIMDSANNV

SEQ ID NO: 13325 - protein, 18 aa, Artificial Sequence
  Cyclic GFR-binding peptide
  MOD_RES (4)..(5): Xaa is C or S
PPTXXVPTRLSNITIQIM

SEQ ID NO: 13326 - protein, 17 aa, Artificial Sequence
  Cyclic GFR-binding peptide
  MOD_RES (3)..(4): Xaa is C or S
GPXXTPTKMSNITMQIM

SEQ ID NO: 13327 - protein, 13 aa, Artificial Sequence
  Cyclic GFR-binding peptide
TPTKMSNITMQIM

SEQ ID NO: 13328 - protein, 18 aa, Artificial Sequence
  Cyclic GFR-binding peptide
ARLSNITIQIMDAANNVV

SEQ ID NO: 13329 - protein, 22 aa, Artificial Sequence
  Cyclic GFR-binding peptide
  MOD_RES (6)..(7): Xaa is C or S
RVPSTXXAPVKTSNITMQIMDN

SEQ ID NO: 13330 - protein, 24 aa, Artificial Sequence
  Cyclic GFR-binding peptide
  MOD_RES (6)..(7): Xaa is C or S
STPPTXXVPTRLSNITIQIMDSAN

SEQ ID NO: 13331 - protein, 18 aa, Artificial Sequence
  Cyclic GFR-binding peptide
  MOD_RES (4)..(5): Xaa is C or S
PSTXXAPVKTSNITMQIM

SEQ ID NO: 13332 - protein, 17 aa, Artificial Sequence
  Cyclic GFR-binding peptide
RLSNITIQIMDAANNVV

SEQ ID NO: 13333 - protein, 17 aa, Artificial Sequence
  Cyclic GFR-binding peptide
  MOD_RES (3)..(4): Xaa is C or S
STXXAPVKTSNITMQIM

SEQ ID NO: 13334 - protein, 23 aa, Artificial Sequence
  Cyclic GFR-binding peptide
  MOD_RES (6)..(7): Xaa is C or S
RVPSTXXAPVKTSNITMQIMDNG

SEQ ID NO: 13335 - protein, 17 aa, Artificial Sequence
  Cyclic GFR-binding peptide
KMSNITMQIMNDKQQII

SEQ ID NO: 13336 - protein, 21 aa, Artificial Sequence
  Cyclic GFR-binding peptide
  MOD_RES (6)..(7): Xaa is C or S
RVPSTXXAPVKTSNITMQIMD

SEQ ID NO: 13337 - protein, 19 aa, Artificial Sequence
  Cyclic GFR-binding peptide
PARLSNITIQIMDAANNVV

SEQ ID NO: 13338 - protein, 26 aa, Artificial Sequence
  Cyclic GFR-binding peptide
  MOD_RES (6)..(7): Xaa is C or S
RVPSTXXAPVKTSNITMQIMDNGRVL

SEQ ID NO: 13339 - protein, 19 aa, Artificial Sequence
  Cyclic GFR-binding peptide
  MOD_RES (5)..(6): Xaa is C or S
APASXXVPARLSNITIQIM

SEQ ID NO: 13340 - protein, 17 aa, Artificial Sequence
  Cyclic GFR-binding peptide
  MOD_RES (3)..(4): Xaa is C or S
PTXXVPTRLSNITIQIM

SEQ ID NO: 13341 - protein, 22 aa, Artificial Sequence
  Cyclic GFR-binding peptide
  MOD_RES (6)..(7): Xaa is C or S
GSAGPXXTPTKMSNITMQIMND

SEQ ID NO: 13342 - protein, 18 aa, Artificial Sequence
  Cyclic GFR-binding peptide
TKMSNITMQIMNDKQQII

SEQ ID NO: 13343 - protein, 20 aa, Artificial Sequence
  Cyclic GFR-binding peptide
  MOD_RES (6)..(7): Xaa is C or S
STPPTXXVPTRLSNITIQIM

SEQ ID NO: 13344 - protein, 21 aa, Artificial Sequence
  Cyclic GFR-binding peptide
  MOD_RES (6)..(7): Xaa is C or S
GSAGPXXTPTKMSNITMQIMN

SEQ ID NO: 13345 - protein, 14 aa, Artificial Sequence
  Cyclic GFR-binding peptide
  MOD_RES (1)..(1): Xaa is C or S
XVPARLSNITIQIM

SEQ ID NO: 13346 - protein, 26 aa, Artificial Sequence
  Cyclic GFR-binding peptide
  MOD_RES (6)..(7): Xaa is C or S
AAPASXXVPARLSNITIQIMDAANNV

SEQ ID NO: 13347 - protein, 23 aa, Artificial Sequence
  Cyclic GFR-binding peptide
  MOD_RES (6)..(7): Xaa is C or S
STPPTXXVPTRLSNITIQIMDSA

SEQ ID NO: 13348 - protein, 19 aa, Artificial Sequence
  Cyclic GFR-binding peptide
  MOD_RES (5)..(6): Xaa is C or S
SAGPXXTPTKMSNITMQIM

SEQ ID NO: 13349 - protein, 19 aa, Artificial Sequence
  Cyclic GFR-binding peptide
PVKTSNITMQIMDNGRVLL

SEQ ID NO: 13350 - protein, 20 aa, Artificial Sequence
  Cyclic GFR-binding peptide
  MOD_RES (6)..(7): Xaa is C or S
AAPASXXVPARLSNITIQIM

SEQ ID NO: 13351 - protein, 22 aa, Artificial Sequence
  Cyclic GFR-binding peptide
  MOD_RES (16)..(17): Xaa is C or S
DDLYLVSIASLKTPAXXPKPVH

SEQ ID NO: 13352 - protein, 16 aa, Artificial Sequence
  Cyclic GFR-binding peptide
IIQQKDNLYLMSIASM

SEQ ID NO: 13353 - protein, 25 aa, Artificial Sequence
  Cyclic GFR-binding peptide
  MOD_RES (19)..(20): Xaa is C or S
NNAADLYLISIASLRAPVXXSAPAA

SEQ ID NO: 13354 - protein, 21 aa, Artificial Sequence
  Cyclic GFR-binding peptide
  MOD_RES (15)..(16): Xaa is C or S
NLYLMSIASMKTPTXXPGASG

SEQ ID NO: 13355 - protein, 15 aa, Artificial Sequence
  Cyclic GFR-binding peptide
  MOD_RES (14)..(15): Xaa is C or S
LYLISIASLRAPVXX

SEQ ID NO: 13356 - protein, 19 aa, Artificial Sequence
  Cyclic GFR-binding peptide
  MOD_RES (14)..(15): Xaa is C or S
LYLISIASMKEPVXXPEPI

SEQ ID NO: 13357 - protein, 14 aa, Artificial Sequence
  Cyclic GFR-binding peptide
  MOD_RES (14)..(14): Xaa is C or S
LYLISIASMKEPVX

SEQ ID NO: 13358 - protein, 14 aa, Artificial Sequence
  Cyclic GFR-binding peptide
  MOD_RES (14)..(14): Xaa is C or S
LYLMSIASTKVPAX

SEQ ID NO: 13359 - protein, 18 aa, Artificial Sequence
  Cyclic GFR-binding peptide
YTVVGKDLYLISIASLKT

SEQ ID NO: 13360 - protein, 27 aa, Artificial Sequence
  Cyclic GFR-binding peptide
  MOD_RES (21)..(22): Xaa is C or S
IVNSSDDLYLVSIASLKTPAXXPKPVH

SEQ ID NO: 13361 - protein, 22 aa, Artificial Sequence
  Cyclic GFR-binding peptide
  MOD_RES (16)..(17): Xaa is C or S
EDLYLISIASMKEPVXXPEPIG

SEQ ID NO: 13362 - protein, 15 aa, Artificial Sequence
  Cyclic GFR-binding peptide
VVNNAADLYLISIAS

SEQ ID NO: 13363 - protein, 20 aa, Artificial Sequence
  Cyclic GFR-binding peptide
  MOD_RES (14)..(15): Xaa is C or S
LYLMSIASTKVPAXXTSPVR

SEQ ID NO: 13364 - protein, 13 aa, Artificial Sequence
  Cyclic GFR-binding peptide
LYLISIASLRAPV

SEQ ID NO: 13365 - protein, 23 aa, Artificial Sequence
  Cyclic GFR-binding peptide
  MOD_RES (17)..(18): Xaa is C or S
SDDLYLVSIASLKTPAXXPKPVH

SEQ ID NO: 13366 - protein, 20 aa, Artificial Sequence
  Cyclic GFR-binding peptide
  MOD_RES (14)..(15): Xaa is C or S
LYLMSIASMKTPTXXPGASG

SEQ ID NO: 13367 - protein, 15 aa, Artificial Sequence
  Cyclic GFR-binding peptide
  MOD_RES (14)..(15): Xaa is C or S
LYLISIASMKEPVXX

SEQ ID NO: 13368 - protein, 25 aa, Artificial Sequence
  Cyclic GFR-binding peptide
  MOD_RES (19)..(20): Xaa is C or S
QQKDNLYLMSIASMKTPTXXPGASG

SEQ ID NO: 13369 - protein, 19 aa, Artificial Sequence
  Cyclic GFR-binding peptide
  MOD_RES (14)..(15): Xaa is C or S
LYLISIASLRAPVXXSAPA

SEQ ID NO: 13370 - protein, 21 aa, Artificial Sequence
  Cyclic GFR-binding peptide
  MOD_RES (15)..(16): Xaa is C or S
DLYLISIASLRAPVXXSAPAA

SEQ ID NO: 13371 - protein, 19 aa, Artificial Sequence
  Cyclic GFR-binding peptide
  MOD_RES (14)..(15): Xaa is C or S
LYLMSIASTKVPAXXTSPV

SEQ ID NO: 13372 - protein, 21 aa, Artificial Sequence
  Cyclic GFR-binding peptide
  MOD_RES (15)..(16): Xaa is C or S
DLYLISIASMKEPVXXPEPIG

SEQ ID NO: 13373 - protein, 17 aa, Artificial Sequence
  Cyclic GFR-binding peptide
  MOD_RES (14)..(15): Xaa is C or S
LYLMSIASMKTPTXXPG

SEQ ID NO: 13374 - protein, 13 aa, Artificial Sequence
  Cyclic GFR-binding peptide
LYLISIASMKEPV

SEQ ID NO: 13375 - protein, 26 aa, Artificial Sequence
  Cyclic GFR-binding peptide
  MOD_RES (20)..(21): Xaa is C or S
LVRGNDLYLMSIASTKVPAXXTSPVR

SEQ ID NO: 13376 - protein, 27 aa, Artificial Sequence
  Cyclic GFR-binding peptide
  MOD_RES (21)..(22): Xaa is C or S
VVNKNEDLYLISIASMKEPVXXPEPIG

SEQ ID NO: 13377 - protein, 15 aa, Artificial Sequence
  Cyclic GFR-binding peptide
IIQQKDNLYLMSIAS

SEQ ID NO: 13378 - protein, 14 aa, Artificial Sequence
  Cyclic GFR-binding peptide
  MOD_RES (14)..(14): Xaa is C or S
LYLISIASLKTPVX

SEQ ID NO: 13379 - protein, 27 aa, Artificial Sequence
  Cyclic GFR-binding peptide
  MOD_RES (21)..(22): Xaa is C or S
IIQQKDNLYLMSIASMKTPTXXPGASG

SEQ ID NO: 13380 - protein, 17 aa, Artificial Sequence
  Cyclic GFR-binding peptide
VVNKNEDLYLISIASMK

SEQ ID NO: 13381 - protein, 16 aa, Artificial Sequence
  Cyclic GFR-binding peptide
  MOD_RES (14)..(15): Xaa is C or S
LYLISIASLRAPVXXS

SEQ ID NO: 13382 - protein, 17 aa, Artificial Sequence
  Cyclic GFR-binding peptide
  MOD_RES (14)..(15): Xaa is C or S
LYLISIASLKTPVXXAK

SEQ ID NO: 13383 - protein, 14 aa, Artificial Sequence
  Cyclic GFR-binding peptide
  MOD_RES (14)..(14): Xaa is C or S
LYLMSIASMKTPTX

SEQ ID NO: 13384 - protein, 26 aa, Artificial Sequence
  Cyclic GFR-binding peptide
  MOD_RES (20)..(21): Xaa is C or S
VNNAADLYLISIASLRAPVXXSAPAA

SEQ ID NO: 13385 - protein, 20 aa, Artificial Sequence
  Cyclic GFR-binding peptide
  MOD_RES (14)..(15): Xaa is C or S
LYLISIASLKTPVXXAKSAK

SEQ ID NO: 13386 - protein, 18 aa, Artificial Sequence
  Cyclic GFR-binding peptide
LLVRGNDLYLMSIASTKV

SEQ ID NO: 13387 - protein, 24 aa, Artificial Sequence
  Cyclic GFR-binding peptide
  MOD_RES (18)..(19): Xaa is C or S
NAADLYLISIASLRAPVXXSAPAA

SEQ ID NO: 13388 - protein, 16 aa, Artificial Sequence
  Cyclic GFR-binding peptide
  MOD_RES (14)..(15): Xaa is C or S
LYLISIASMKEPVXXP

SEQ ID NO: 13389 - protein, 25 aa, Artificial Sequence
  Cyclic GFR-binding peptide
  MOD_RES (19)..(20): Xaa is C or S
VVGKDLYLISIASLKTPVXXAKSAK

SEQ ID NO: 13390 - protein, 15 aa, Artificial Sequence
  Cyclic GFR-binding peptide
  MOD_RES (14)..(15): Xaa is C or S
LYLISIASLKTPVXX

SEQ ID NO: 13391 - protein, 17 aa, Artificial Sequence
  Cyclic GFR-binding peptide
VVNNAADLYLISIASLR

SEQ ID NO: 13392 - protein, 19 aa, Artificial Sequence
  Cyclic GFR-binding peptide
VVNNAADLYLISIASLRAP

SEQ ID NO: 13393 - protein, 17 aa, Artificial Sequence
  Cyclic GFR-binding peptide
  MOD_RES (14)..(15): Xaa is C or S
LYLMSIASTKVPAXXTS

SEQ ID NO: 13394 - protein, 24 aa, Artificial Sequence
  Cyclic GFR-binding peptide
  MOD_RES (18)..(19): Xaa is C or S
SSDDLYLVSIASLKTPAXXPKPVH

SEQ ID NO: 13395 - protein, 15 aa, Artificial Sequence
  Cyclic GFR-binding peptide
LLVRGNDLYLMSIAS

SEQ ID NO: 13396 - protein, 18 aa, Artificial Sequence
  Cyclic GFR-binding peptide
  MOD_RES (14)..(15): Xaa is C or S
LYLMSIASTKVPAXXTSP

SEQ ID NO: 13397 - protein, 25 aa, Artificial Sequence
  Cyclic GFR-binding peptide
  MOD_RES (19)..(20): Xaa is C or S
VRGNDLYLMSIASTKVPAXXTSPVR

SEQ ID NO: 13398 - protein, 18 aa, Artificial Sequence
  Cyclic GFR-binding peptide
IIQQKDNLYLMSIASMKT

SEQ ID NO: 13399 - protein, 17 aa, Artificial Sequence
  Cyclic GFR-binding peptide
  MOD_RES (14)..(15): Xaa is C or S
LYLISIASMKEPVXXPE

SEQ ID NO: 13400 - protein, 16 aa, Artificial Sequence
  Cyclic GFR-binding peptide
  MOD_RES (14)..(15): Xaa is C or S
LYLMSIASTKVPAXXT

SEQ ID NO: 13401 - protein, 18 aa, Artificial Sequence
  Cyclic GFR-binding peptide
VVNKNEDLYLISIASMKE

SEQ ID NO: 13402 - protein, 23 aa, Artificial Sequence
  Cyclic GFR-binding peptide
  MOD_RES (17)..(18): Xaa is C or S
GNDLYLMSIASTKVPAXXTSPVR

SEQ ID NO: 13403 - protein, 16 aa, Artificial Sequence
  Cyclic GFR-binding peptide
  MOD_RES (14)..(15): Xaa is C or S
LYLMSIASMKTPTXXP

SEQ ID NO: 13404 - protein, 13 aa, Artificial Sequence
  Cyclic GFR-binding peptide
LYLISIASLKTPV

SEQ ID NO: 13405 - protein, 22 aa, Artificial Sequence
  Cyclic GFR-binding peptide
  MOD_RES (16)..(17): Xaa is C or S
KDLYLISIASLKTPVXXAKSAK

SEQ ID NO: 13406 - protein, 17 aa, Artificial Sequence
  Cyclic GFR-binding peptide
LLVRGNDLYLMSIASTK

SEQ ID NO: 13407 - protein, 19 aa, Artificial Sequence
  Cyclic GFR-binding peptide
IIQQKDNLYLMSIASMKTP

SEQ ID NO: 13408 - protein, 27 aa, Artificial Sequence
  Cyclic GFR-binding peptide
  MOD_RES (21)..(22): Xaa is C or S
VVNNAADLYLISIASLRAPVXXSAPAA

SEQ ID NO: 13409 - protein, 24 aa, Artificial Sequence
  Cyclic GFR-binding peptide
  MOD_RES (18)..(19): Xaa is C or S
VGKDLYLISIASLKTPVXXAKSAK

SEQ ID NO: 13410 - protein, 18 aa, Artificial Sequence
  Cyclic GFR-binding peptide
  MOD_RES (14)..(15): Xaa is C or S
LYLISIASLRAPVXXSAP

SEQ ID NO: 13411 - protein, 18 aa, Artificial Sequence
  Cyclic GFR-binding peptide
  MOD_RES (14)..(15): Xaa is C or S
LYLISIASMKEPVXXPEP

SEQ ID NO: 13412 - protein, 18 aa, Artificial Sequence
  Cyclic GFR-binding peptide
  MOD_RES (14)..(15): Xaa is C or S
LYLMSIASMKTPTXXPGA

SEQ ID NO: 13413 - protein, 24 aa, Artificial Sequence
  Cyclic GFR-binding peptide
  MOD_RES (18)..(19): Xaa is C or S
RGNDLYLMSIASTKVPAXXTSPVR

SEQ ID NO: 13414 - protein, 17 aa, Artificial Sequence
  Cyclic GFR-binding peptide
YTVVGKDLYLISIASLK

SEQ ID NO: 13415 - protein, 27 aa, Artificial Sequence
  Cyclic GFR-binding peptide
  MOD_RES (21)..(22): Xaa is C or S
LLVRGNDLYLMSIASTKVPAXXTSPVR

SEQ ID NO: 13416 - protein, 25 aa, Artificial Sequence
  Cyclic GFR-binding peptide
  MOD_RES (19)..(20): Xaa is C or S
NSSDDLYLVSIASLKTPAXXPKPVH

SEQ ID NO: 13417 - protein, 20 aa, Artificial Sequence
  Cyclic GFR-binding peptide
  MOD_RES (14)..(15): Xaa is C or S
LYLVSIASLKTPAXXPKPVH

SEQ ID NO: 13418 - protein, 18 aa, Artificial Sequence
  Cyclic GFR-binding peptide
VVNNAADLYLISIASLRA

SEQ ID NO: 13419 - protein, 16 aa, Artificial Sequence
  Cyclic GFR-binding peptide
  MOD_RES (14)..(15): Xaa is C or S
LYLISIASLKTPVXXA

SEQ ID NO: 13420 - protein, 16 aa, Artificial Sequence
  Cyclic GFR-binding peptide
LLVRGNDLYLMSIAST

SEQ ID NO: 13421 - protein, 24 aa, Artificial Sequence
  Cyclic GFR-binding peptide
  MOD_RES (18)..(19): Xaa is C or S
KNEDLYLISIASMKEPVXXPEPIG

SEQ ID NO: 13422 - protein, 21 aa, Artificial Sequence
  Cyclic GFR-binding peptide
  MOD_RES (15)..(16): Xaa is C or S
DLYLISIASLKTPVXXAKSAK

SEQ ID NO: 13423 - protein, 13 aa, Artificial Sequence
  Cyclic GFR-binding peptide
LYLMSIASMKTPT

SEQ ID NO: 13424 - protein, 16 aa, Artificial Sequence
  Cyclic GFR-binding peptide
VVNNAADLYLISIASL

SEQ ID NO: 13425 - protein, 25 aa, Artificial Sequence
  Cyclic GFR-binding peptide
  MOD_RES (19)..(20): Xaa is C or S
NKNEDLYLISIASMKEPVXXPEPIG

SEQ ID NO: 13426 - protein, 26 aa, Artificial Sequence
  Cyclic GFR-binding peptide
  MOD_RES (20)..(21): Xaa is C or S
VNKNEDLYLISIASMKEPVXXPEPIG

SEQ ID NO: 13427 - protein, 21 aa, Artificial Sequence
  Cyclic GFR-binding peptide
  MOD_RES (15)..(16): Xaa is C or S
DLYLVSIASLKTPAXXPKPVH

SEQ ID NO: 13428 - protein, 26 aa, Artificial Sequence
  Cyclic GFR-binding peptide
  MOD_RES (20)..(21): Xaa is C or S
TVVGKDLYLISIASLKTPVXXAKSAK

SEQ ID NO: 13429 - protein, 15 aa, Artificial Sequence
  Cyclic GFR-binding peptide
  MOD_RES (14)..(15): Xaa is C or S
LYLMSIASMKTPTXX

SEQ ID NO: 13430 - protein, 16 aa, Artificial Sequence
  Cyclic GFR-binding peptide
VVNKNEDLYLISIASM

SEQ ID NO: 13431 - protein, 15 aa, Artificial Sequence
  Cyclic GFR-binding peptide
YTVVGKDLYLISIAS

SEQ ID NO: 13432 - protein, 22 aa, Artificial Sequence
  Cyclic GFR-binding peptide
  MOD_RES (16)..(17): Xaa is C or S
ADLYLISIASLRAPVXXSAPAA

SEQ ID NO: 13433 - protein, 20 aa, Artificial Sequence
  Cyclic GFR-binding peptide
  MOD_RES (14)..(15): Xaa is C or S
LYLISIASMKEPVXXPEPIG

SEQ ID NO: 13434 - protein, 23 aa, Artificial Sequence
  Cyclic GFR-binding peptide
  MOD_RES (17)..(18): Xaa is C or S
NEDLYLISIASMKEPVXXPEPIG

SEQ ID NO: 13435 - protein, 20 aa, Artificial Sequence
  Cyclic GFR-binding peptide
  MOD_RES (14)..(15): Xaa is C or S
LYLISIASLRAPVXXSAPAA

SEQ ID NO: 13436 - protein, 26 aa, Artificial Sequence
  Cyclic GFR-binding peptide
  MOD_RES (20)..(21): Xaa is C or S
IQQKDNLYLMSIASMKTPTXXPGASG

SEQ ID NO: 13437 - protein, 23 aa, Artificial Sequence
  Cyclic GFR-binding peptide
  MOD_RES (17)..(18): Xaa is C or S
GKDLYLISIASLKTPVXXAKSAK

SEQ ID NO: 13438 - protein, 27 aa, Artificial Sequence
  Cyclic GFR-binding peptide
  MOD_RES (21)..(22): Xaa is C or S
YTVVGKDLYLISIASLKTPVXXAKSAK

SEQ ID NO: 13439 - protein, 19 aa, Artificial Sequence
  Cyclic GFR-binding peptide
VVNKNEDLYLISIASMKEP

SEQ ID NO: 13440 - protein, 22 aa, Artificial Sequence
  Cyclic GFR-binding peptide
  MOD_RES (16)..(17): Xaa is C or S
DNLYLMSIASMKTPTXXPGASG

SEQ ID NO: 13441 - protein, 21 aa, Artificial Sequence
  Cyclic GFR-binding peptide
  MOD_RES (15)..(16): Xaa is C or S
DLYLMSIASTKVPAXXTSPVR

SEQ ID NO: 13442 - protein, 17 aa, Artificial Sequence
  Cyclic GFR-binding peptide
  MOD_RES (14)..(15): Xaa is C or S
LYLISIASLRAPVXXSA

SEQ ID NO: 13443 - protein, 19 aa, Artificial Sequence
  Cyclic GFR-binding peptide
  MOD_RES (14)..(15): Xaa is C or S
LYLISIASLKTPVXXAKSA

SEQ ID NO: 13444 - protein, 16 aa, Artificial Sequence
  Cyclic GFR-binding peptide
YTVVGKDLYLISIASL

SEQ ID NO: 13445 - protein, 14 aa, Artificial Sequence
  Cyclic GFR-binding peptide
  MOD_RES (14)..(14): Xaa is C or S
LYLISIASLRAPVX

SEQ ID NO: 13446 - protein, 19 aa, Artificial Sequence
  Cyclic GFR-binding peptide
  MOD_RES (14)..(15): Xaa is C or S
LYLMSIASMKTPTXXPGAS

SEQ ID NO: 13447 - protein, 26 aa, Artificial Sequence
  Cyclic GFR-binding peptide
  MOD_RES (20)..(21): Xaa is C or S
VNSSDDLYLVSIASLKTPAXXPKPVH

SEQ ID NO: 13448 - protein, 19 aa, Artificial Sequence
  Cyclic GFR-binding peptide
LLVRGNDLYLMSIASTKVP

SEQ ID NO: 13449 - protein, 23 aa, Artificial Sequence
  Cyclic GFR-binding peptide
  MOD_RES (17)..(18): Xaa is C or S
KDNLYLMSIASMKTPTXXPGASG

SEQ ID NO: 13450 - protein, 22 aa, Artificial Sequence
  Cyclic GFR-binding peptide
  MOD_RES (16)..(17): Xaa is C or S
NDLYLMSIASTKVPAXXTSPVR

SEQ ID NO: 13451 - protein, 15 aa, Artificial Sequence
  Cyclic GFR-binding peptide
VVNKNEDLYLISIAS

SEQ ID NO: 13452 - protein, 19 aa, Artificial Sequence
  Cyclic GFR-binding peptide
YTVVGKDLYLISIASLKTP

SEQ ID NO: 13453 - protein, 13 aa, Artificial Sequence
  Cyclic GFR-binding peptide
LYLMSIASTKVPA

SEQ ID NO: 13454 - protein, 23 aa, Artificial Sequence
  Cyclic GFR-binding peptide
  MOD_RES (17)..(18): Xaa is C or S
AADLYLISIASLRAPVXXSAPAA

SEQ ID NO: 13455 - protein, 24 aa, Artificial Sequence
  Cyclic GFR-binding peptide
  MOD_RES (18)..(19): Xaa is C or S
QKDNLYLMSIASMKTPTXXPGASG

SEQ ID NO: 13456 - protein, 15 aa, Artificial Sequence
  Cyclic GFR-binding peptide
  MOD_RES (14)..(15): Xaa is C or S
LYLMSIASTKVPAXX

SEQ ID NO: 13457 - protein, 18 aa, Artificial Sequence
  Cyclic GFR-binding peptide
  MOD_RES (14)..(15): Xaa is C or S
LYLISIASLKTPVXXAKS

SEQ ID NO: 13458 - protein, 17 aa, Artificial Sequence
  Cyclic GFR-binding peptide
IIQQKDNLYLMSIASMK

SEQ ID NO: 13459 - protein, 22 aa, Artificial Sequence
  Cyclic GFR-binding peptide
  MOD_RES (6)..(7): Xaa is C or S
HVPKPXXAPTKLSAISVLYLDD

SEQ ID NO: 13460 - protein, 16 aa, Artificial Sequence
  Cyclic GFR-binding peptide
MSAISMLYLNDKQQII

SEQ ID NO: 13461 - protein, 25 aa, Artificial Sequence
  Cyclic GFR-binding peptide
  MOD_RES (6)..(7): Xaa is C or S
AAPASXXVPARLSAISILYLDAANN

SEQ ID NO: 13462 - protein, 21 aa, Artificial Sequence
  Cyclic GFR-binding peptide
  MOD_RES (6)..(7): Xaa is C or S
GSAGPXXTPTKMSAISMLYLN

SEQ ID NO: 13463 - protein, 15 aa, Artificial Sequence
  Cyclic GFR-binding peptide
  MOD_RES (1)..(2): Xaa is C or S
XXVPARLSAISILYL

SEQ ID NO: 13464 - protein, 19 aa, Artificial Sequence
  Cyclic GFR-binding peptide
  MOD_RES (5)..(6): Xaa is C or S
IPEPXXVPEKMSAISILYL

SEQ ID NO: 13465 - protein, 14 aa, Artificial Sequence
  Cyclic GFR-binding peptide
  MOD_RES (1)..(1): Xaa is C or S
XVPEKMSAISILYL

SEQ ID NO: 13466 - protein, 14 aa, Artificial Sequence
  Cyclic GFR-binding peptide
  MOD_RES (1)..(1): Xaa is C or S
XAPVKTSAISMLYL

SEQ ID NO: 13467 - protein, 18 aa, Artificial Sequence
  Cyclic GFR-binding peptide
TKLSAISILYLDKGVVTY

SEQ ID NO: 13468 - protein, 27 aa, Artificial Sequence
  Cyclic GFR-binding peptide
  MOD_RES (6)..(7): Xaa is C or S
HVPKPXXAPTKLSAISVLYLDDSSNVI

SEQ ID NO: 13469 - protein, 22 aa, Artificial Sequence
  Cyclic GFR-binding peptide
  MOD_RES (6)..(7): Xaa is C or S
GIPEPXXVPEKMSAISILYLDE

SEQ ID NO: 13470 - protein, 15 aa, Artificial Sequence
  Cyclic GFR-binding peptide
SAISILYLDAANNVV

SEQ ID NO: 13471 - protein, 20 aa, Artificial Sequence
  Cyclic GFR-binding peptide
  MOD_RES (6)..(7): Xaa is C or S
RVPSTXXAPVKTSAISMLYL

SEQ ID NO: 13472 - protein, 13 aa, Artificial Sequence
  Cyclic GFR-binding peptide
VPARLSAISILYL

SEQ ID NO: 13473 - protein, 23 aa, Artificial Sequence
  Cyclic GFR-binding peptide
  MOD_RES (6)..(7): Xaa is C or S
HVPKPXXAPTKLSAISVLYLDDS

SEQ ID NO: 13474 - protein, 20 aa, Artificial Sequence
  Cyclic GFR-binding peptide
  MOD_RES (6)..(7): Xaa is C or S
GSAGPXXTPTKMSAISMLYL

SEQ ID NO: 13475 - protein, 15 aa, Artificial Sequence
  Cyclic GFR-binding peptide
  MOD_RES (1)..(2): Xaa is C or S
XXVPEKMSAISILYL

SEQ ID NO: 13476 - protein, 25 aa, Artificial Sequence
  Cyclic GFR-binding peptide
  MOD_RES (6)..(7): Xaa is C or S
GSAGPXXTPTKMSAISMLYLNDKQQ

SEQ ID NO: 13477 - protein, 19 aa, Artificial Sequence
  Cyclic GFR-binding peptide
  MOD_RES (5)..(6): Xaa is C or S
APASXXVPARLSAISILYL

SEQ ID NO: 13478 - protein, 21 aa, Artificial Sequence
  Cyclic GFR-binding peptide
  MOD_RES (6)..(7): Xaa is C or S
AAPASXXVPARLSAISILYLD

SEQ ID NO: 13479 - protein, 19 aa, Artificial Sequence
  Cyclic GFR-binding peptide
  MOD_RES (5)..(6): Xaa is C or S
VPSTXXAPVKTSAISMLYL

SEQ ID NO: 13480 - protein, 21 aa, Artificial Sequence
  Cyclic GFR-binding peptide
  MOD_RES (6)..(7): Xaa is C or S
GIPEPXXVPEKMSAISILYLD

SEQ ID NO: 13481 - protein, 17 aa, Artificial Sequence
  Cyclic GFR-binding peptide
  MOD_RES (3)..(4): Xaa is C or S
GPXXTPTKMSAISMLYL

SEQ ID NO: 13482 - protein, 13 aa, Artificial Sequence
  Cyclic GFR-binding peptide
VPEKMSAISILYL

SEQ ID NO: 13483 - protein, 26 aa, Artificial Sequence
  Cyclic GFR-binding peptide
  MOD_RES (6)..(7): Xaa is C or S
RVPSTXXAPVKTSAISMLYLDNGRVL

SEQ ID NO: 13484 - protein, 27 aa, Artificial Sequence
  Cyclic GFR-binding peptide
  MOD_RES (6)..(7): Xaa is C or S
GIPEPXXVPEKMSAISILYLDENKNVV

SEQ ID NO: 13485 - protein, 15 aa, Artificial Sequence
  Cyclic GFR-binding peptide
SAISMLYLNDKQQII

SEQ ID NO: 13486 - protein, 14 aa, Artificial Sequence
  Cyclic GFR-binding peptide
  MOD_RES (1)..(1): Xaa is C or S
XVPTKLSAISILYL

SEQ ID NO: 13487 - protein, 27 aa, Artificial Sequence
  Cyclic GFR-binding peptide
  MOD_RES (6)..(7): Xaa is C or S
GSAGPXXTPTKMSAISMLYLNDKQQII

SEQ ID NO: 13488 - protein, 17 aa, Artificial Sequence
  Cyclic GFR-binding peptide
KMSAISILYLDENKNVV

SEQ ID NO: 13489 - protein, 16 aa, Artificial Sequence
  Cyclic GFR-binding peptide
  MOD_RES (2)..(3): Xaa is C or S
SXXVPARLSAISILYL

SEQ ID NO: 13490 - protein, 17 aa, Artificial Sequence
  Cyclic GFR-binding peptide
  MOD_RES (3)..(4): Xaa is C or S
KAXXVPTKLSAISILYL

SEQ ID NO: 13491 - protein, 14 aa, Artificial Sequence
  Cyclic GFR-binding peptide
  MOD_RES (1)..(1): Xaa is C or S
XTPTKMSAISMLYL

SEQ ID NO: 13492 - protein, 26 aa, Artificial Sequence
  Cyclic GFR-binding peptide
  MOD_RES (6)..(7): Xaa is C or S
AAPASXXVPARLSAISILYLDAANNV

SEQ ID NO: 13493 - protein, 20 aa, Artificial Sequence
  Cyclic GFR-binding peptide
  MOD_RES (6)..(7): Xaa is C or S
KASKAXXVPTKLSAISILYL

SEQ ID NO: 13494 - protein, 18 aa, Artificial Sequence
  Cyclic GFR-binding peptide
VKTSAISMLYLDNGRVLL

SEQ ID NO: 13495 - protein, 24 aa, Artificial Sequence
  Cyclic GFR-binding peptide
  MOD_RES (6)..(7): Xaa is C or S
AAPASXXVPARLSAISILYLDAAN

SEQ ID NO: 13496 - protein, 16 aa, Artificial Sequence
  Cyclic GFR-binding peptide
  MOD_RES (2)..(3): Xaa is C or S
PXXVPEKMSAISILYL

SEQ ID NO: 13497 - protein, 25 aa, Artificial Sequence
  Cyclic GFR-binding peptide
  MOD_RES (6)..(7): Xaa is C or S
KASKAXXVPTKLSAISILYLDKGVV

SEQ ID NO: 13498 - protein, 15 aa, Artificial Sequence
  Cyclic GFR-binding peptide
  MOD_RES (1)..(2): Xaa is C or S
XXVPTKLSAISILYL

SEQ ID NO: 13499 - protein, 17 aa, Artificial Sequence
  Cyclic GFR-binding peptide
RLSAISILYLDAANNVV

SEQ ID NO: 13500 - protein, 19 aa, Artificial Sequence
  Cyclic GFR-binding peptide
PARLSAISILYLDAANNVV

SEQ ID NO: 13501 - protein, 17 aa, Artificial Sequence
  Cyclic GFR-binding peptide
  MOD_RES (3)..(4): Xaa is C or S
STXXAPVKTSAISMLYL

SEQ ID NO: 13502 - protein, 24 aa, Artificial Sequence
  Cyclic GFR-binding peptide
  MOD_RES (6)..(7): Xaa is C or S
HVPKPXXAPTKLSAISVLYLDDSS

SEQ ID NO: 13503 - protein, 15 aa, Artificial Sequence
  Cyclic GFR-binding peptide
SAISMLYLDNGRVLL

SEQ ID NO: 13504 - protein, 18 aa, Artificial Sequence
  Cyclic GFR-binding peptide
  MOD_RES (4)..(5): Xaa is C or S
PSTXXAPVKTSAISMLYL

SEQ ID NO: 13505 - protein, 25 aa, Artificial Sequence
  Cyclic GFR-binding peptide
  MOD_RES (6)..(7): Xaa is C or S
RVPSTXXAPVKTSAISMLYLDNGRV

SEQ ID NO: 13506 - protein, 18 aa, Artificial Sequence
  Cyclic GFR-binding peptide
TKMSAISMLYLNDKQQII

SEQ ID NO: 13507 - protein, 17 aa, Artificial Sequence
  Cyclic GFR-binding peptide
  MOD_RES (3)..(4): Xaa is C or S
EPXXVPEKMSAISILYL

SEQ ID NO: 13508 - protein, 16 aa, Artificial Sequence
  Cyclic GFR-binding peptide
  MOD_RES (2)..(3): Xaa is C or S
TXXAPVKTSAISMLYL

SEQ ID NO: 13509 - protein, 18 aa, Artificial Sequence
  Cyclic GFR-binding peptide
EKMSAISILYLDENKNVV

SEQ ID NO: 13510 - protein, 23 aa, Artificial Sequence
  Cyclic GFR-binding peptide
  MOD_RES (6)..(7): Xaa is C or S
RVPSTXXAPVKTSAISMLYLDNG

SEQ ID NO: 13511 - protein, 16 aa, Artificial Sequence
  Cyclic GFR-binding peptide
  MOD_RES (2)..(3): Xaa is C or S
PXXTPTKMSAISMLYL

SEQ ID NO: 13512 - protein, 13 aa, Artificial Sequence
  Cyclic GFR-binding peptide
VPTKLSAISILYL

SEQ ID NO: 13513 - protein, 22 aa, Artificial Sequence
  Cyclic GFR-binding peptide
  MOD_RES (6)..(7): Xaa is C or S
KASKAXXVPTKLSAISILYLDK

SEQ ID NO: 13514 - protein, 17 aa, Artificial Sequence
  Cyclic GFR-binding peptide
KTSAISMLYLDNGRVLL

SEQ ID NO: 13515 - protein, 19 aa, Artificial Sequence
  Cyclic GFR-binding peptide
PTKMSAISMLYLNDKQQII

SEQ ID NO: 13516 - protein, 27 aa, Artificial Sequence
  Cyclic GFR-binding peptide
  MOD_RES (6)..(7): Xaa is C or S
AAPASXXVPARLSAISILYLDAANNVV

SEQ ID NO: 13517 - protein, 24 aa, Artificial Sequence
  Cyclic GFR-binding peptide
  MOD_RES (6)..(7): Xaa is C or S
KASKAXXVPTKLSAISILYLDKGV

SEQ ID NO: 13518 - protein, 18 aa, Artificial Sequence
  Cyclic GFR-binding peptide
  MOD_RES (4)..(5): Xaa is C or S
PASXXVPARLSAISILYL

SEQ ID NO: 13519 - protein, 18 aa, Artificial Sequence
  Cyclic GFR-binding peptide
  MOD_RES (4)..(5): Xaa is C or S
PEPXXVPEKMSAISILYL

SEQ ID NO: 13520 - protein, 18 aa, Artificial Sequence
  Cyclic GFR-binding peptide
  MOD_RES (4)..(5): Xaa is C or S
AGPXXTPTKMSAISMLYL

SEQ ID NO: 13521 - protein, 24 aa, Artificial Sequence
  Cyclic GFR-binding peptide
  MOD_RES (6)..(7): Xaa is C or S
RVPSTXXAPVKTSAISMLYLDNGR

SEQ ID NO: 13522 - protein, 17 aa, Artificial Sequence
  Cyclic GFR-binding peptide
KLSAISILYLDKGVVTY

SEQ ID NO: 13523 - protein, 27 aa, Artificial Sequence
  Cyclic GFR-binding peptide
  MOD_RES (6)..(7): Xaa is C or S
RVPSTXXAPVKTSAISMLYLDNGRVLL

SEQ ID NO: 13524 - protein, 25 aa, Artificial Sequence
  Cyclic GFR-binding peptide
  MOD_RES (6)..(7): Xaa is C or S
HVPKPXXAPTKLSAISVLYLDDSSN

SEQ ID NO: 13525 - protein, 20 aa, Artificial Sequence
  Cyclic GFR-binding peptide
  MOD_RES (6)..(7): Xaa is C or S
HVPKPXXAPTKLSAISVLYL

SEQ ID NO: 13526 - protein, 18 aa, Artificial Sequence
  Cyclic GFR-binding peptide
ARLSAISILYLDAANNVV

SEQ ID NO: 13527 - protein, 16 aa, Artificial Sequence
  Cyclic GFR-binding peptide
  MOD_RES (2)..(3): Xaa is C or S
AXXVPTKLSAISILYL

SEQ ID NO: 13528 - protein, 16 aa, Artificial Sequence
  Cyclic GFR-binding peptide
TSAISMLYLDNGRVLL

SEQ ID NO: 13529 - protein, 24 aa, Artificial Sequence
  Cyclic GFR-binding peptide
  MOD_RES (6)..(7): Xaa is C or S
GIPEPXXVPEKMSAISILYLDENK

SEQ ID NO: 13530 - protein, 21 aa, Artificial Sequence
  Cyclic GFR-binding peptide
  MOD_RES (6)..(7): Xaa is C or S
KASKAXXVPTKLSAISILYLD

SEQ ID NO: 13531 - protein, 13 aa, Artificial Sequence
  Cyclic GFR-binding peptide
TPTKMSAISMLYL

SEQ ID NO: 13532 - protein, 16 aa, Artificial Sequence
  Cyclic GFR-binding peptide
LSAISILYLDAANNVV

SEQ ID NO: 13533 - protein, 25 aa, Artificial Sequence
  Cyclic GFR-binding peptide
  MOD_RES (6)..(7): Xaa is C or S
GIPEPXXVPEKMSAISILYLDENKN

SEQ ID NO: 13534 - protein, 26 aa, Artificial Sequence
  Cyclic GFR-binding peptide
  MOD_RES (6)..(7): Xaa is C or S
GIPEPXXVPEKMSAISILYLDENKNV

SEQ ID NO: 13535 - protein, 21 aa, Artificial Sequence
  Cyclic GFR-binding peptide
  MOD_RES (6)..(7): Xaa is C or S
HVPKPXXAPTKLSAISVLYLD

SEQ ID NO: 13536 - protein, 26 aa, Artificial Sequence
  Cyclic GFR-binding peptide
  MOD_RES (6)..(7): Xaa is C or S
KASKAXXVPTKLSAISILYLDKGVVT

SEQ ID NO: 13537 - protein, 15 aa, Artificial Sequence
  Cyclic GFR-binding peptide
  MOD_RES (1)..(2): Xaa is C or S
XXTPTKMSAISMLYL

SEQ ID NO: 13538 - protein, 16 aa, Artificial Sequence
  Cyclic GFR-binding peptide
MSAISILYLDENKNVV

SEQ ID NO: 13539 - protein, 15 aa, Artificial Sequence
  Cyclic GFR-binding peptide
SAISILYLDKGVVTY

SEQ ID NO: 13540 - protein, 22 aa, Artificial Sequence
  Cyclic GFR-binding peptide
  MOD_RES (6)..(7): Xaa is C or S
AAPASXXVPARLSAISILYLDA

SEQ ID NO: 13541 - protein, 20 aa, Artificial Sequence
  Cyclic GFR-binding peptide
  MOD_RES (6)..(7): Xaa is C or S
GIPEPXXVPEKMSAISILYL

SEQ ID NO: 13542 - protein, 23 aa, Artificial Sequence
  Cyclic GFR-binding peptide
  MOD_RES (6)..(7): Xaa is C or S
GIPEPXXVPEKMSAISILYLDEN

SEQ ID NO: 13543 - protein, 20 aa, Artificial Sequence
  Cyclic GFR-binding peptide
  MOD_RES (6)..(7): Xaa is C or S
AAPASXXVPARLSAISILYL

SEQ ID NO: 13544 - protein, 26 aa, Artificial Sequence
  Cyclic GFR-binding peptide
  MOD_RES (6)..(7): Xaa is C or S
GSAGPXXTPTKMSAISMLYLNDKQQI

SEQ ID NO: 13545 - protein, 23 aa, Artificial Sequence
  Cyclic GFR-binding peptide
  MOD_RES (6)..(7): Xaa is C or S
KASKAXXVPTKLSAISILYLDKG

SEQ ID NO: 13546 - protein, 27 aa, Artificial Sequence
  Cyclic GFR-binding peptide
  MOD_RES (6)..(7): Xaa is C or S
KASKAXXVPTKLSAISILYLDKGVVTY

SEQ ID NO: 13547 - protein, 19 aa, Artificial Sequence
  Cyclic GFR-binding peptide
PEKMSAISILYLDENKNVV

SEQ ID NO: 13548 - protein, 22 aa, Artificial Sequence
  Cyclic GFR-binding peptide
  MOD_RES (6)..(7): Xaa is C or S
GSAGPXXTPTKMSAISMLYLND

SEQ ID NO: 13549 - protein, 21 aa, Artificial Sequence
  Cyclic GFR-binding peptide
  MOD_RES (6)..(7): Xaa is C or S
RVPSTXXAPVKTSAISMLYLD

SEQ ID NO: 13550 - protein, 17 aa, Artificial Sequence
  Cyclic GFR-binding peptide
  MOD_RES (3)..(4): Xaa is C or S
ASXXVPARLSAISILYL

SEQ ID NO: 13551 - protein, 19 aa, Artificial Sequence
  Cyclic GFR-binding peptide
  MOD_RES (5)..(6): Xaa is C or S
ASKAXXVPTKLSAISILYL

SEQ ID NO: 13552 - protein, 16 aa, Artificial Sequence
  Cyclic GFR-binding peptide
LSAISILYLDKGVVTY

SEQ ID NO: 13553 - protein, 14 aa, Artificial Sequence
  Cyclic GFR-binding peptide
  MOD_RES (1)..(1): Xaa is C or S
XVPARLSAISILYL

SEQ ID NO: 13554 - protein, 19 aa, Artificial Sequence
  Cyclic GFR-binding peptide
  MOD_RES (5)..(6): Xaa is C or S
SAGPXXTPTKMSAISMLYL

SEQ ID NO: 13555 - protein, 26 aa, Artificial Sequence
  Cyclic GFR-binding peptide
  MOD_RES (6)..(7): Xaa is C or S
HVPKPXXAPTKLSAISVLYLDDSSNV

SEQ ID NO: 13556 - protein, 19 aa, Artificial Sequence
  Cyclic GFR-binding peptide
PVKTSAISMLYLDNGRVLL

SEQ ID NO: 13557 - protein, 23 aa, Artificial Sequence
  Cyclic GFR-binding peptide
  MOD_RES (6)..(7): Xaa is C or S
GSAGPXXTPTKMSAISMLYLNDK

SEQ ID NO: 13558 - protein, 22 aa, Artificial Sequence
  Cyclic GFR-binding peptide
  MOD_RES (6)..(7): Xaa is C or S
RVPSTXXAPVKTSAISMLYLDN

SEQ ID NO: 13559 - protein, 15 aa, Artificial Sequence
  Cyclic GFR-binding peptide
SAISILYLDENKNVV

SEQ ID NO: 13560 - protein, 19 aa, Artificial Sequence
  Cyclic GFR-binding peptide
PTKLSAISILYLDKGVVTY

SEQ ID NO: 13561 - protein, 13 aa, Artificial Sequence
  Cyclic GFR-binding peptide
APVKTSAISMLYL

SEQ ID NO: 13562 - protein, 23 aa, Artificial Sequence
  Cyclic GFR-binding peptide
  MOD_RES (6)..(7): Xaa is C or S
AAPASXXVPARLSAISILYLDAA

SEQ ID NO: 13563 - protein, 24 aa, Artificial Sequence
  Cyclic GFR-binding peptide
  MOD_RES (6)..(7): Xaa is C or S
GSAGPXXTPTKMSAISMLYLNDKQ

SEQ ID NO: 13564 - protein, 15 aa, Artificial Sequence
  Cyclic GFR-binding peptide
  MOD_RES (1)..(2): Xaa is C or S
XXAPVKTSAISMLYL

SEQ ID NO: 13565 - protein, 18 aa, Artificial Sequence
  Cyclic GFR-binding peptide
  MOD_RES (4)..(5): Xaa is C or S
SKAXXVPTKLSAISILYL

SEQ ID NO: 13566 - protein, 17 aa, Artificial Sequence
  Cyclic GFR-binding peptide
KMSAISMLYLNDKQQII

SEQ ID NO: 13567 - protein, 7 aa, Artificial Sequence
  Building block peptide "PEP"
  MOD_RES (6)..(7): Xaa is C or S
KIPKAXX

SEQ ID NO: 13568 - protein, 7 aa, Artificial Sequence
  Building block peptide "PEP"
  MOD_RES (6)..(7): Xaa is C or S
GIPEPXX

SEQ ID NO: 13569 - protein, 7 aa, Artificial Sequence
  Building block peptide "PEP"
  MOD_RES (6)..(7): Xaa is C or S
SIPKAXX

SEQ ID NO: 13570 - protein, 7 aa, Artificial Sequence
  Building block peptide "PEP"
  MOD_RES (7)..(7): Xaa is C or S
HVTKPTX

SEQ ID NO: 13571 - protein, 7 aa, Artificial Sequence
  Building block peptide "PEP"
  MOD_RES (6)..(7): Xaa is C or S
YVPKPXX

SEQ ID NO: 13572 - protein, 7 aa, Artificial Sequence
  Building block peptide "PEP"
  MOD_RES (6)..(7): Xaa is C or S
TVPKPXX

SEQ ID NO: 13573 - protein, 7 aa, Artificial Sequence
  Building block peptide "PEP"
  MOD_RES (6)..(7): Xaa is C or S
AVPKAXX

SEQ ID NO: 13574 - protein, 7 aa, Artificial Sequence
  Building block peptide "PEP"
  MOD_RES (6)..(7): Xaa is C or S
KVGKAXX

SEQ ID NO: 13575 - protein, 7 aa, Artificial Sequence
  Building block peptide "PEP"
  MOD_RES (6)..(7): Xaa is C or S
KASKAXX

SEQ ID NO: 13576 - protein, 7 aa, Artificial Sequence
  Building block peptide "PEP"
  MOD_RES (6)..(7): Xaa is C or S
GSAGPXX

SEQ ID NO: 13577 - protein, 7 aa, Artificial Sequence
  Building block peptide "PEP"
  MOD_RES (6)..(7): Xaa is C or S
AAPASXX

SEQ ID NO: 13578 - protein, 7 aa, Artificial Sequence
  Building block peptide "PEP"
  MOD_RES (6)..(7): Xaa is C or S
STPPTXX

SEQ ID NO: 13579 - protein, 7 aa, Artificial Sequence
  Building block peptide "PEP"
  MOD_RES (6)..(7): Xaa is C or S
HVPKPXX

SEQ ID NO: 13580 - protein, 7 aa, Artificial Sequence
  Building block peptide "PEP"
  MOD_RES (6)..(7): Xaa is C or S
RVPSTXX

SEQ ID NO: 13581 - protein, 7 aa, Artificial Sequence
  Building block peptide "PEP"
  MOD_RES (6)..(7): Xaa is C or S
ASAAPXX

SEQ ID NO: 13582 - protein, 7 aa, Artificial Sequence
  Building block peptide "PEP"
  MOD_RES (6)..(7): Xaa is C or S
ASASPXX

SEQ ID NO: 13583 - protein, 7 aa, Artificial Sequence
  Building block peptide "PEP"
  MOD_RES (7)..(7): Xaa is C or S
NDEGLEX

SEQ ID NO: 13584 - protein, 7 aa, Artificial Sequence
  Building block peptide "PEP"
  MOD_RES (5)..(5): Xaa is C or S
SSVKXQP

SEQ ID NO: 13585 - protein, 7 aa, Artificial Sequence
  Building block peptide "PEP"
  MOD_RES (5)..(5): Xaa is C or S
RNVQXRP

SEQ ID NO: 13586 - protein, 4 aa, Artificial Sequence
  Building block peptide "PEP"
SAIS

SEQ ID NO: 13587 - protein, 4 aa, Artificial Sequence
  Building block peptide "PEP"
SSLS

SEQ ID NO: 13588 - protein, 4 aa, Artificial Sequence
  Building block peptide "PEP"
NAIS

SEQ ID NO: 13589 - protein, 4 aa, Artificial Sequence
  Building block peptide "PEP"
SATS

SEQ ID NO: 13590 - protein, 4 aa, Artificial Sequence
  Building block peptide "PEP"
SPIS

SEQ ID NO: 13591 - protein, 4 aa, Artificial Sequence
  Building block peptide "PEP"
EPIS

SEQ ID NO: 13592 - protein, 4 aa, Artificial Sequence
  Building block peptide "PEP"
SPIN

SEQ ID NO: 13593 - protein, 4 aa, Artificial Sequence
  Building block peptide "PEP"
KPLS

SEQ ID NO: 13594 - protein, 4 aa, Artificial Sequence
  Building block peptide "PEP"
EPLP

SEQ ID NO: 13595 - protein, 4 aa, Artificial Sequence
  Building block peptide "PEP"
EPLT

SEQ ID NO: 13596 - protein, 4 aa, Artificial Sequence
  Building block peptide "PEP"
SNIT

SEQ ID NO: 13597 - protein, 4 aa, Artificial Sequence
  Building block peptide "PEP"
RSVK

SEQ ID NO: 13598 - protein, 4 aa, Artificial Sequence
  Building block peptide "PEP"
RPVQ

SEQ ID NO: 13599 - protein, 7 aa, Artificial Sequence
  Building block peptide "PEP"
DENEKVV

SEQ ID NO: 13600 - protein, 7 aa, Artificial Sequence
  Building block peptide "PEP"
DENKNVV

SEQ ID NO: 13601 - protein, 7 aa, Artificial Sequence
  Building block peptide "PEP"
DEYDKVV

SEQ ID NO: 13602 - protein, 7 aa, Artificial Sequence
  Building block peptide "PEP"
DDSSNVI

SEQ ID NO: 13603 - protein, 7 aa, Artificial Sequence
  Building block peptide "PEP"
DSSNNVI

SEQ ID NO: 13604 - protein, 7 aa, Artificial Sequence
  Building block peptide "PEP"
DDMGVPT

SEQ ID NO: 13605 - protein, 7 aa, Artificial Sequence
  Building block peptide "PEP"
DKGVVTY

SEQ ID NO: 13606 - protein, 7 aa, Artificial Sequence
  Building block peptide "PEP"
NDKQQII

SEQ ID NO: 13607 - protein, 7 aa, Artificial Sequence
  Building block peptide "PEP"
DAANNVV

SEQ ID NO: 13608 - protein, 7 aa, Artificial Sequence
  Building block peptide "PEP"
DSANNVV

SEQ ID NO: 13609 - protein, 7 aa, Artificial Sequence
  Building block peptide "PEP"
DNGRVLL

SEQ ID NO: 13610 - protein, 7 aa, Artificial Sequence
  Building block peptide "PEP"
VGRKPKV

SEQ ID NO: 13611 - protein, 7 aa, Artificial Sequence
  Building block peptide "PEP"
IGKTPKI

SEQ ID NO: 13612 - protein, 7 aa, Artificial Sequence
  Building block peptide "PEP"
VGRTPKV

SEQ ID NO: 13613 - protein, 9 aa, Artificial Sequence
  Building block peptide "PEP"
RIKPHQGQH

SEQ ID NO: 13614 - protein, 9 aa, Artificial Sequence
  Building block peptide "PEP"
EYVRKKPKL

SEQ ID NO: 13615 - protein, 9 aa, Artificial Sequence
  Building block peptide "PEP"
EIVRKKPIF
